United States Patent Application Publication US 2019/0002960 A1 - sequence listing, part 13

SEQ ID NO: 13 - DNA, 2751266 bp, Staphylococcus aureus subsp. aureus CN1 (residues 1-1,375,633 of 2,751,266)
cgattaaagatagaaatacacgatgcgagcaatcaaatttcataacatcaccatgagtttggtccgaagcatgagtgtttacaatgtttgaataccttatacagttcttatacatactttataaattatttcccaagctgtttttatacactcactaacagatattctatagaaggaaaagttatctacttatgcacatttatagttttcagaattgtggataattagaaattacacacaaagttatactatttttagcaacatattcacaggtatttgacatatagagaactgaaaaagtataattgtgtggataagtcgtccaactcatgattttataaggatttatttattgatatttacataaaaatactgtgcataactaataagcaggataaagttatccaccgattgttattaacttgtggataattattaacatggtgtgtttagaagttatccacggctgttatttttgtgtataacttaaaaatttaagaaagatggagtaaatttatgtcggaaaaagaaatttgggaaaaagtgcttgaaattgctcaagaaaaattatcagctgtaagttactcaactttcctaaaagatactgagctttacacgattaaagatggtgaagctatcgtattatcgagtattccttttaatgcaaattggttaaatcaacaatatgctgaaattatccaagcaatcttatttgatgttgtaggctatgaagttaaacctcactttattactactgaagaattagcaaattatagtaataatgaaactgctactccaaaagaaacaacaaaaccttctactgaaacaactgaggataatcatgtgcttggtagagagcaattcaatgcccataacacatttgacacttttgtaatcggacctggtaaccgctttccacatgcagcaagtttagctgtagccgaagcaccagccaaagcgtacaatccattatttatctatggaggtgttggtttaggaaaaacccatttaatgcatgccattggtcatcatgttttagataataatccagatgccaaagtgatttacacatcaagtgaaaaattcacaaatgaatttattaaatcaattcgtgataacgaaggtgaagctttcagagaaagatatcgtaatatcgacgtcttattaatcgatgatattcagttcatacaaaataaagtacaaacacaagaagaatttttctatacttttaatgaattgcatcagaataacaagcaaatagttatttcgagtgatcgaccaccaaaggaaattgcacaattagaagaccgattacgttcacgctttgaatgggggctaattgttgatattacgccaccagattatgaaactcgaatggcaattttgcagaagaaaattgaagaagaaaaattagatattccaccagaagctttaaattatatagcaaatcaaattcaatctaatattcgtgaattagaaggtgcattaacacgtttacttgcatattcacaattattaggaaaaccaattacaactgaattaactgctgaagctttaaaagatatcattcaagcaccaaaatctaaaaagattaccatccaagatattcaaaaaattgtaggccagtactataatgttagaattgaagatttcagtgcaaaaaaacgtacaaagtcaattgcatatccgcgtcaaatagctatgtacttgtctagagagcttacagatttctcattacctaaaattggtgaagaatttggtgggcgtgatcatacgaccgtcattcatgctcatgaaaaaatatctaaagatttaaaagaagatcctatttttaaacaagaagtagagaatcttgaaaaagaaataagaaatgtataagtaggaaactttgggaaatgtaatctgttatataacagcactaataataactgtcattttttacatttctatatactaatgtggcaagatgagcaaaactcattttgtggataatgtttaaaagtcatacacaccatacacaagttatcaacatgtgtataacttcgccaaatctatgtttttaagacttatccaccaatccacagcacctactactattactaagaacttaaaacctatataattatatataaacgactggaaggagttttaattaatgatggaattcactattaaaagagattattttattacacaattaaatgacacattaaaagctatttcaccaagaacaacattacctatattaactggtatcaaaatcgatgcgaaagaacatgaagttatattaactggttcagactctgaaatttcaatagaaatcactattcctaaaactgtagatggcgaagatattgtcaatatttcagaaacaggctcagtagtacttcctggacgattctttgttgatattataaaaaaattacctggtaaagatgttaaattatctacaaatgaacaattccagacattaattacatcaggtcattctgaatttaatttgagtggcttagatccagatcaatatcctttattacctcaagtttctagagatgacgcaattcaattgtcggtaaaagtacttaaaaacgtgattgcacaaacgaattttgcagtgtccacctcagaaacacgcccagtactaactggtgtgaactggcttatacaagaaaatgaattaatatgcacagcgactgattcacaccgcttggctgtaagaaagttgcagttagaagatgtttctgaaaacaaaaatgtcatcattccaggtaaggctttagctgaattaaataaaattatgtctgacaatgaagaagacattgatatcttctttgcttcaaaccaagttttatttaaagttggaaatgtgaactttatttctcgattattagaaggacattatcctgatacaacacgtttattccctgaaaactatgaaattaaattaagtatagacaatggggagttttatcatgcgattgatcgtgcctctttattagcacgtgaaggtggtaataacgttattaaattaagtacaggtgatgacgttgttgaattatcttctacatcaccagaaattggtactgtaaaagaagaagttgatgcaaacgatgttgaaggtggtagcctgaaaatttcattcaactctaaatatatgatggatgctttaaaagcaatcgataatgatgaggttgaagttgaattcttcggtacaatgaaaccatttattctaaaaccaaaaggtgacgactcggtaacgcaattaattttaccaatcagaacttactaaaaataaaaataaatataaataaaggatgacgtgattaattaaaacgtcatcctttattttttggcaaaaataattctagatgcgtatgtaaaataaatttgacagcattttaaacagcaaataaaagacgccaattaaatttatgacaaatgtatccaaaatttaataagtgtgcttatatgccctttaaatttaaaattttaatagtcaataacaagttgaatataaaagttaaacgccgttaaatagcgttaaaaaattgaaaatgacagtattgccaaaaaataagaattaattatttatatgtaaacggtttctacctctattttaaatgaaatttgtgacaaaaaaaggtataatatattaatgacatacaaagaaatggagtgattattttggttcaagaagttgtagtagaaggagacattaatttaggtcaatttctaaaaacagaagggattattgaatctggtggtcaagcaaaatggttcttgcaagacgttgaagtattaattaatggagtgcgtgaaacacgtcgcggtaaaaagttagaacatcaagatcgtatagatatcccagaattacctgaagatgctggttctttcttaatcattcatcaaggtgaacaatgaagctaaatacactccaattagaaaattatcgtaactatgatgaggttacgttgaaatgtcatcctgacgtgaatatcctcattggagaaaatgcacaaggaaagacaaatttacttgaatcaatttataccttagctttagcaaaaagtcatagaacgagtaatgataaggaactcatacgttttaatgctgattatgctaaaatagaaggtgagcttagttatagacacggcacgatgccattaacaatgtttataactaaaaaaggtaaacaagtcaaagtgaatcacttagagcaaagtcgtctaactcaatatattggacacctcaatgtggttctatttgcgccagaagatttgaatattgtaaaaggctctcctcaaataagacgacgctttatagatatggagttgggccaaatttctgctgtttacttaaatgatttagctcaataccaacgtattttaaagcaaaagaataattacttaaagcagttacaattaggccaaaaaaaggacttaacaatgttggaagtattaaatcagcagtttgctgaatatgcaatgaaagtaactgataaacgtgcacattttattcaagagctagagtcgttagctaaaccgattcatgctggtatcacaaatgataaagaagcgttgtcgctgaattatttacctagtcttaaatttgattatgctcaaaatgaagcggcacgacttgaagaaattatgtctattcttagcgataatatgcaaagagaaaaagaacgaggcattagcttattcggaccacatcgagatgatataagttttgatgtgaatggcatggatgctcaaacatatggttctcaaggacagcaacgtacaacggctttgtccattaaattagctgaaattgagttaatgaatatcgaagttggggaatatcccatcttattattagacgatgtactcagtgaattagatgattcgcgtcaaacgcatttattaagtacgattcagcataaagtacaaacatttgtcactacgacatctgtagatggtattgatcatgaaatcatgaataacgctaaattgtatcgtattaatcaaggtgaaattataaagtaacagaaagcgatggtgactgcattgtcagatgtaaacaacacggataattatggtgctgggcaaatacaagtattagaaggtttagaagcagtacgtaaaagaccaggtatgtatataggatcgacttcagagagaggtttgcaccatttagtgtgggaaattgtcgataatagtatcgatgaagcattagctggttatgcaaatcaaattgaagttgttattgaaaaagataactggattaaagtaacggataacggacgtggtatcccagttgatattcaagaaaaaatgggacgtccagctgtcgaagttattttaactgttttacatgctggtggtaaatttggcggtggcggatacaaagtatctggtggtttacatggtgttggttcatcagttgtaaacgcattgtcacaagacttagaagtatatgtacacagaaatgagactatatatcatcaagcatataaaaaaggtgtacctcaatttgacttaaaagaagttggcacaactgataagacaggtactgtcattcgttttaaagcagatggagaaatcttcacagagacaactgtatacaactatgaaacattacagcagcgtattagagagcttgctttcttaaacaaaggaattcaaatcacattaagagatgaacgtgatgaagaaaacgttagagaagactcctatcactatgagggcggtattaaatcgtacgttgagttattgaacgaaaataaagaacctattcatgatgagccaatttatattcatcaatctaaagatgatattgaagtagaaattgcgattcaatataactcaggatatgccacaaatcttttaacttacgcaaataacattcatacgtatgaaggtggtacgcatgaagacggattcaaacgtgcattaacgcgtgtcttaaatagttatggtttaagtagcaagattatgaaagaagaaaaagatagactttctggtgaagatacacgtgaaggtatgacagcaattatatctatcaaacatggtgatcctcaattcgaaggtcaaacgaagacaaaattaggtaattctgaagtgcgtcaagttgtagataaattattctcagagcactttgaacgatttttatatgaaaatccacaagtcgcacgtacagtggttgaaaaaggtattatggcggcacgtgcacgtgttgctgcgaaaaaagcgcgtgaagtaacacgtcgtaaatcagcgttagatgtagcaagccttccaggtaaattagccgattgctctagtaaaagtcctgaagaatgtgagattttcttagtcgaaggggactctgccggggggtctacaaaatctggtcgtgactctagaacgcaggcgattttaccattacgaggtaagatattaaatgttgaaaaagcacgattagatagaattttgaataacaatgaaattcgtcaaatgatcacagcatttggtacaggaatcggtggcgactttgatctagcgaaagcaagatatcacaaaatcgtcattatgactgatgccgatgtggatggagcgcatattagaacattgttattaacattcttctatcgatttatgagaccgttaattgaagcaggctatgtgtatattgcacagccaccgttgtataaactgacacaaggtaaacaaaagtattatgtatacaatgatagggaacttgataaacttaaatctgaattgaatccaacaccaaaatggtctattgcacgatacaaaggtcttggagaaatgaatgcagatcaattatgggaaacaacaatgaaccctgagcaccgcgctcttttacaagtaaaacttgaagatgcgattgaagcggaccaaacatttgaaatgttaatgggtgatgttgtagaaaaccgtagacaatttatagaagataatgcagtttatgcaaacttagacttctaagcgctgtgaactgaacttttgaaggaggaactcttgatggctgaattacctcaatcaagaataaatgaacgaaatattaccagtgaaatgcgtgaatcatttttagattatgcgatgagtgttatcgttgctcgtgcattgccagatgttcgtgacggtttaaaaccagtacatcgtcgtatactatatggattaaatgaacaaggtatgacaccggataaatcatataaaaaatcagcacgtatcgttggtgacgtaatgggtaaatatcaccctcatggtgactcatctatttatgaagcaatggtacgtatggctcaagatttcagttatcgttatccgcttgttgatggccaaggtaactttggttcaatggatggagatggcgcagcagcaatgcgttatactgaagcgcgtatgactaaaatcacacttgaactgttacgtgatattaataaagatacaatagattttatcgataactatgatggtaatgaaagagagccgtcagtcttacctgctcgattccctaacttgttagccaatggtgcatcaggtatcgcggtaggtatggcaacgaatattccaccacataacttaacagaattaatcaatggtgtacttagcttaagtaagaaccctgatatttcaattgctgagttaatggaggatattgaaggtcctgatttcccaactgctggacttattttaggtaagagtggtattagacgtgcatatgaaacaggtcgtggttcaattcaaatgcgttctcgtgcagttattgaagaacgtggaggcggacgtcaacgtattgttgtcactgaaattcctttccaagtgaataaggctcgtatgattgaaaaaattgcagagctcgttcgtgacaagaaaattgacggtatcactgatttacgtgatgaaacaagtttacgtactggtgtgcgtgtcgttattgatgtgcgtaaggatgcaaatgctagtgtcattttaaataacttatacaaacaaacacctcttcaaacatcatttggtgtgaatatgattgcacttgtaaatggtagaccgaagcttattaatttaaaagaagcgttggtacattatttagagcatcaaaagacagttgttagaagacgtacgcaatacaacttacgtaaagctaaagatcgtgcccacattttagaaggattacgtatcgcacttgaccatatcgatgaaattatttcaacgattcgtgagtcagatacagataaagttgcaatggaaagcttgcaacaacgcttcaaactttctgaaaaacaagctcaagctattttagacatgcgtttaagacgtctaacaggtttagagagagacaaaattgaagctgaatataatgagttattaaattatattagtgaattagaagcaatcttagctgatgaagaagtgttattacagttagttagagatgaattgactgaaattagagatcgtttcggtgatgatcgtcgtacagaaattcaattaggtggatttgaagacttagaggacgaagacttaattccagaagaacaaatagtaattacactaagccataataactacattaaacgtttgccggtatctacatatcgtgctcaaaaccgtggtggtcgtggtgttcaaggtatgaatacattggaagaagattttgtcagtcaattggtaactttaagtacacatgaccatgtattgttctttactaacaaaggtcgtgtatacaaacttaaaggttacgaagtgcctgagttatcaagacagtctaaaggtattcctgtagtgaatgctattgaacttgaaaatgatgaagtcattagtacaatgattgctgttaaagaccttgaaagtgaagacaacttcttagtgtttgcaactaaacgtggtgtcgttaaacgttcagcattaagtaacttctcaagaataaatagaaatggtaagattgcgatttcgttcagagaagatgatgagttaattgcagttcgcttaacaagtggtcaagaagatatcttgattggtacatcacatgcatcattaattcgattccctgaatcaacattacgtcctttaggccgtacagcaacgggtgtgaaaggtattacacttcgtgaaggtgacgaagttgtagggcttgatgtagctcatgcaaacagtgttgatgaagtattagtagttactgaaaatggttatggtaaacgtacgccagttaatgactatcgtttatcaaatcgtggtggtaaaggtattaaaacagctacgattactgagcgtaatggtaatgttgtatgtatcactacagtaactggtgaagaagatttaatgattgttactaatgcaggtgtcattattcgactagatgttgcagatatttctcaaaatggtcgtgcagcacaaggtgttcgcttaattcgcttaggtgatgatcaatttgtttcaacggttgctaaagtaaaagaagatgcagaagatgaaacgaatgaagatgagcaatctacttcaactgtatctgaagatggtactgaacaacaacgtgaagcggttgtaaatgatgaaacaccaggaaatgcaattcatactgaagtgattgattcagaagaaaatgatgaagatggacgtattgaagtaagacaagatttcatggatcgtgttgaagaagatatacaacaatcctcagatgaagatgaagaataataaaaaaataagacttccctatatgtaggggagtcttatttttatgctagaaagtaatgctgtactacattcaatgattagtaatgactaactttctaattgtttcattgcgtaaggtatttcattgataagtcttgatggtggcaccacatacatatcttttgcaagattttcgccaataaaactatgtgtatatgtggcactcataaccgcttcttttaagttatcaaattgaccgacaaaacttgtaatcatgccagcaagagtatcacccataccaccagtagccatcgcaggactaccaattgtcaatttaaagtcttcatctttaaagaaaatttcagtaccatgtttttttagtacaactgttgcacctaaacgatctaccgcttcacgattacgttcataagtttgttcctcaattggaataccgcttaaacgttcccactctttgaggtgtggagtgaatattacacgacacgtaggtaattgcggtttcagtttactaaagattgtaatcgcatcgccgtctacgattaaattttgatgcggttgtatattttgtagtaggaatgtaatggcattatttcctttgaaatcaacgccaagacctggaccaattagtatactgtcagtcatttcaatcattttcgtcaacattttcgtatcattaatatcaataaccatcgcttctgggcaacgagaatgtaatgctgaatgatttgttggatgtgtagctacagtgattaaaccactaccgctaaatacacatgcacgagccgctaacataatggcaccacctaagttagcagatccaccaattaataaaattttgccataatcacctttatgtgaatcttctttacgcttaggaatgttaatagaatttaacgtttccatagtgatataacctcccatgtaaaagccttttccgaatttattcaattttaaaaatatatagtaacttttaacaaaatgtattataaatttctgaattcattattatttgtcgttaaatacaatagaaaatactatacctgtatatgcaattcgtcaatagataaattattaaatatgcttacaacaatcttaatatcctttaacgcactacaatagtgctctgataataggttataaatgtacgtaaaaccattgtttcaataaaaatgaaaacgtatacttcaagaaggatgggttacttaatataaacaagggggtaacatatatgactttatatttagatggtgaaacactaacaattgaggatattaaatcatttttacaacaacaatcaaagattgaaattattgatgatgcgttagaacgtgtcaaaaaaagtagagcggtagttgaacgtattattgaaaatgagaaaacggtttacggtatcactacaggttttgggttatttagtgatgtacgtatagacccgacgcaatataatgaattacaagtgaatctgatacgctcacatgcctgtggactaggtgagccattttcaaaagaagtagcattagtcatgatgattttacgattgaatacattattaaaaggtcattcaggtgccactttagaattagtgagacaattacaattttttataaatgaacgtattataccgataatcccacagcaaggctctctcggtgcatcaggagatttagcgccattatcacatttagcattagcattaattggtgaagggaaagtattgtacagaggggaagaaaaggatagtgacgatgtattaagagaattaaatagacaacctttgaaccttcaggctaaagaaggtttagcattgattaatggtacgcaagctatgacagctcaaggtgtcattagttatatagaatcagaagatttaggttaccaatctgaatggattgctgcattaacgcatcagtctcttaatggcattatagatgcatatagacatgatgtgcacgctgttcgtaattttcaagaacagattaatgtggcagcgcgtatgcgtgattggttagaaggatcaacattaacgacgcgacaagcagaaatacgtgtacaagatgcatatacgttgcgttgtataccacaaatccatggcgcgagttttcaagtattcaattatgttaaacagcaattagaatttgaaatgaatgcggctaatgataatccacttatatttgaggaagcaaatgaaacgtttgttatttcaggtggtaacttccatggacaacctattgcttttgcattagatcatcttaaattaggtgtaagtgaattagcaaacgtatcggaacgtcgtctagagcgactagtaaatcctcaattaaatggtgatttaccagcatttcttagtccagagccaggattgcaaagtggcgcgatgattatgcaatatgctgctgcaagtctcgtttctgaaaataaaactttagcgcatccagcgagtgttgattctatcacttcatctgcgaaccaagaagatcacgtatctatgggaactacagctgctagacatggttatcaaattattgaaaatgcaagacgtgtgttggcaatcgaatgtgttattgcattacaagcagcagagttgaaaggtgtcgaaggattatcaccaaaaacacgtcgcaagtatgatgagtttcgaagtatcgtgccatccattacacatgatcgtcaatttcataaagatattgaagcggttgcacagtatttaaagcaatcaatttatcaaacgactgcatgtcactaaatcgacatgagtgatgtttgaaatcgttacttgaaaaagcaaatatagtttgctatattaaaaataacttaataagacattgttcgtaggacaagtaatatatagtgttcgatatcagagagcttgtggttagtgtgaacaagaatcaacatatatatgaatctacctacttatttaaaagaacaatcggtgataaccgttattttagtgaagtgcaatttaggtttagtgtatctttataacttaaattgttaaatagggtggcaacgcgtagaccacgtcccttgtagggatgtggtctttttttattttctaaaaaataaagacgtacgtcattccataataaatgataattatttgggaaaggatgaaggttaatgttagacattagattattcagaaatgagcctgacacagttaagagcaaaattgaattacgtggagatgatccaaaagttgtagatgaaattttagaattggatgaacaacgacgtaaattaattagtgcaacagaagaaatgaaagcacgtcgtaataaagtaagcgaagaaatcgcattaaaaaaacgtaataaagaaaatgctgatgatgtgattgctgaaatgcgcacattaggtgacgatattaaagaaaaagatagtcaattaaatgaaattgataataaaatgacaggtatcctttgtcgtattccaaatttaataagtgatgatgtacctcaaggtgaatctgatgaagataacgttgaagttaaaaagtggggtacaccacgtgagttttcatttgaaccaaaagcacattgggatattgtagaagaattgaaaatggctgattttgatcgtgcagcaaaagtttcaggtgcgcgttttgtatatttaacaaatgaaggtgcgcaattagagcgtgctttaatgaactatatgattacaaaacatacaacacaacatggttatacagaaatgatggtaccacagcttgtgaacgcagatacaatgtatggtacaggtcaattacctaaatttgaagaagatttatttaaagtagaaaaagaaggattatatacaattccaactgctgaagtaccattaacgaatttctaccgtaatgaaattattcaaccaggtgtacttcctgaaaaattcactggtcaatctgcatgtttccgtagtgaagcaggatcagcaggtagagatacaagaggattaattcgtttacatcaattcgataaagtggaaatggtacgttttgaacaacctgaagattcatggaatgctttagaagaaatgacaacaaacgcagaagcaattctagaagagttaggtttaccataccgtcgtgttattttatgtacaggtgatattggatttagtgcaagcaaaacatatgatttagaagtttggttaccaagctacaatgattataaagaaattagttcatgctcaaactgtacggatttccaagcgcgtcgtgctaacatccgcttcaagcgtgacaaagcagctaaaccagaattagcacatacattaaatggtagtggtttagcagttggacgtacatttgctgctattgttgaaaattaccaaaatgaagatggaacagtaacaattccagaagcattagtaccatttatgggtggtaaaacacaaatttcaaaaccagttaaataaaggctttagctacaagctttaaaaagtatatatctacgtatacttaaagcaagggcaagatactttaaataatattttaaaaagtggtgacgaagctgtcgccactttttttgtgctgtaaaagtataatattgagtcaatgcacataacaacaataaattaagtttgtggtttaatggggtgaacgcatttcattatagcaacaatacgggataattatgatgaatcgaaccaatctaaaacgtaacaattttaagcatcactattataggaaattaagcgataaaaaactgatttcgttgatatgtagtatgagttatatcgatgcagtagggtagggggaggggatgatgattataagggaatggtacatgaatcaatatcccagactcatcattagatataaaaaattataaaattagtatttaaaaacaactacaatccatagaaaatatggaggtagtcttaaataaaaaattgaaaattctaaaaaataaaaagttgatatgaagctgattgaagactccagtatgtctaatctcagacaaactggtgtctaatgttattgcttagggtatagaactgtattagactaggtatattatttttttcgtaattatataaatataaagtggcaaaggaggtaattgagatggcaacacatttaagttttagacaaggcgtacaagagtgtatcccaacattattgggttatgccggtgttggtatttcatttggtattgtggcttcgtctcaaaactttagtattttagaaattatcttgttatgtcttgttatatatgccggtgctgcgcaatttattatgtgcgcgttgtttatagcaggtacaccgatatcagcgattgtactaactgtatttatcgtaaattcaagaatgttccttttaagtatgtcgcttgcaccaaacttcaagacatatgggttttggaaccgtgttggattaggttcattagtaactgacgaaacgtttggcgtcgccattacaccttatttaaaaggagaagctatcaatgatcgttggatgcatggtcttaatatcacagcatatttattttgggcaatttcatgtgtagctggggctttatttggcgaatatatctcaaatccgcaaacgctagggttagattttgctatcacggctatgtttatctttttggccattgcgcaatttgaatcaattactaaatcgcgattaagaatttacatagtactcattattgccgtcatagtaatgatgttatcgctaagtatgtttatgccttcatatctagcaatattaattgcagccacaatttcagcagtgttaggagtgatgatggaacgatgataactcatatgaacatgttaatacttattttattgtgtggtatcgtaacgctattaattcgaattataccttttatcatgatttcaaaagtgcaattgcctgatgtcgtggttcgatggctatcatttatcccaatcacactatttacggcacttgtcatagacagcattattcaacagacgcctcatggtgaggggtatacattaaacatcccttacattatcgcgctcattccgacggttattttatctataatcacgcgtagtttaactattacaattattagtgggattgttatcatggcagcattacgatttttcttttaaaaataactgaaaatcattgaacagatatttaaacttaggtaaactgttagtaatcagaaaattcagatatacaaatcgtctatgttaagattgggaatcgtgtatacgtaagcgatttggctaacgcatgacaatgataacaacattttaaatgataaagtaattcatcactgaatctcaactaacacataacaatttcatatttcttattgtgagaagttgagggacttggccctgtgatacttcagcaaccgactttatagcacggtgctaaaaccaacgagttactcgaatgataagtataaagacttcttacttttcaatagggtgagaagttttttgtttaaggaggaaagaacaatgacaaattacacagtagatactttaaatctagggaaatttattacagaatctggggaagtcatagataacttgcgtttgagatatgagcatgtcggttatcatggacaaccattagttgtagtttgtcatgcattaactggcaatcatttaacatatggaacagatgattatccgggttggtggcgagaaattattgatgggggatatatacccattcacgattatcaatttttaacatttgatgttattggtagtcctttcggttcaagttcacctttaaacgaccctcattttcctaaaaaattaacgttaagagatattgtcagagcgaatgaacgaggtatacaagcccttggttatgacaagattaatattttaatagggggaagtcttggaggaatgcaagcaatggaactactttacaatcaacagtttgaagtagataaagccattatccttgctgcaacaagtcgaacatcatcttatagtagagcttttaatgaaattgcaaggcaagccattcatcttggtggtaaggaaggtctaagtattgcacgccaattaggttttttgacatatcgatcatcaaaaagttatgatgaacgtttcacgccggatgaagtagtcgcataccaacaacatcaaggtaataaatttaaagaacattttgatttgaattgttatctgacactgctagatgtattggatagtcacaacattgaccgaggtcgcacagacgtaacgcatgtttttaaaaatttagaaacgaaagtcttaacaatgggttttatagatgatttgctatatccggacgatcaagttcgtgcattaggtgaacgttttaaatatcatcgtcatttcttcgtgcctgataatgttgggcatgatggattcctactaaactttagtacctgggcacctaacttatatcatttcttaaatttaaagcattttaagcgtaagtaataatatatatattttcaaagaatgaagtcactaaatcacagttatcatattcaaaaacatctagagtacatgagagtggtaatgaattgtaaatctaaatcaagcttgattgctatgtagtgggattaaataatcatgttgaaaatgaaagcacacaaaagcgattcaaatgagtatgttaattacttataaaacatgaaagttattattcaattaaatgaaatagaagcatacaatctataaattgttaatttccattaaagaggttaaaataatagctatagttaaaaatatgggagtggcttatgtgttttcaaaaatacaacctaaagcaacaataattgcaacgattgcgttggtatttgtcgctttagctttatatctagtgcctggtttaggactaatatttgcattatttgcaaccataccaggtatcgttttatggaataaatcaatacaatctttcgggattagtgcacttattacagtaattataacaactgttttaggtaatactttcgttttaagtgccatcatattagtcttaattgcaagtttaattattggtcaattgctcaaagaaagaacgtctaaagaaagaatattatacgtaacaacagtagcgatgagcttaatttcattaatcgcttttatgttactacaaacattcggaaggattccaccatcagcgagcatagtaaaacctttcaagcaaacattacatgaagcgattacgatgagcggtgccgatgcgaatatgacccaaatattagaagaagggtttagacaagcgaccgttcaattaccaggtttcatcattatcattacatttttaatcgtcttaattaacttaatcgttacatttccgattttacgaaaatttaaaatcgctacacctgtatttaagccacttttcgcgtggcaaatgagcggtattttattatggatatacattattgttatcatatgtttattatttacaggtcaaccgagtgtgttccagagcattcttttaaacttccaacttgtgttatcattagtaatgtatattcaaggtttaagtgttattcatttctttggtaaagcgaaaggtttgccgaatgcagtaacgattttactattgattatcggtacaatactgacacctacgacacatattgtaggactacttggtgttatcgatttaagtttgaatttgaagagaatcatgaaaaataattctaaaaagtgaatagaggtggaataatgaatcggcagtccactaagaaagctttactaataccatttgtcatcatgatcatcacagcaattgttttaatgggtgtatggtttatctttaatagtcttatagcattaattgcatctatcgttcttgtcgtgatgattattgttagcatcattttattcagacaagctttaatgaaaatggatagttatgtagatggtttgagtgctcaaatttcaacaacaaataataaagcaatcaaacatttaccaattggtatcattgttttagatgaaaatgatcacatcgaatgggttaaccaatttatgacagatcatatggaagcaaatgtcatttctgaatctgtaaatgaagtatttccaaacattttaaagcaattagatagagtgaaatccgttgaaatagaatataatcagtatcatttccaagtacgttattctgagaatgatcactgcctctatttctttgatataactgaacaagtacaaacaaatgaactatatgaaaattctaaaccaatcattgcgacattatttttagataactacgatgagattactcaaaatatgaatgatacgcagcgttcggaaatcaactcaatggtaacgcgtgtcattagtcgatgggcaactgagtataatatattctttaaaaggtatagttccgatcaattcgtagcctatttaaatcaaaaaatattagctgacttagaagaatctaaatttgatatcttgagtcaattacgtgaaaaaagtgttggttatcgtgcccaattaacattgagtattggtgttggtgaaggcactgaaaatttaatcgacttaggtgaattatcacaatcaggcctagacttagcattaggacgcggtggcgaccaagttgcaattaaaagtattaatggtaatgtgcgcttctatggcggtaagactgacccgatggagaaacgtactcgtgtaagagcacgtgtgatttcacatgcgttaaaagatatccttgcagagggtgacaaagtcattatcatgggacataaacgtcctgacttagatgcaattggtgcagcaatcggtgtgtctagatttgcaatgatgaataatttagaagcatacatcgtattaaatgagactgacattgatccaacattacgacgcgtgatgaacgaaattgataaaaagccagagttaagagaacgatttataacatcagatgatgcttgggatatgatgacatctaagacaaccgtagtgattgttgatacgcataaaccggaactggttttagatgaaaatgtcttaaataaagcaaaccgtaaagttgttatcgatcatcatagacgtggtgaaagcttcatctctaatccattgttgatatatatggaaccatacgcaagttcaacagctgaattggtaacagagttactggaatatcaaccaacagaacaacgtttaacacgtcttgaatcaacagtgatgtatgcaggtattattgtagatacaagaaactttacattacgaacaggatcaagaacattcgatgcagcgagttatttacgtgcacatggtgcagatacgattttaacgcaacatttcttaaaagatgatgtggatacttacattaatcgatctgaattaattcgaactgtaaaagttgaagataatggcatagccattgcgcatggttcagacgataaaatttatcatccagtaacagttgcacaagcagcagatgaactgttaagtttagaaggtattgaagcatcatatgttgttgcgagacgtgaagataatctgattggtatatctgcgcgttcactcggttcagtaaatgtccagttaacaatggaagcacttggtggcggtggacatttaaccaatgctgcaacacaacttaaaggtgtgacagtcgaagaggcgatagcacaattacaacaagcaattacagaacaattaagtaggagtgaagatgcatgaaagtaatttttacacaagatgttaaaggtaaaggtaaaaaaggtgaagttaaagaagtaccagtaggttatgcaaataacttcttattgaaaaagaattatgctgtagaagcaacaccaggtaaccttaaacaattagagttacagaaaaaacgtgcaaaacaagaacgccaacaagaaattgaagatgctaaagcattaaaagaaacgttatcaaatatcgaagttgaagtatcagctaaaactggtgaaggcggtaagttgtttggatcagtaagtacgaaacaaattgctgaagcattaaaagcgcaacacgatattaaaattgataaacgtaaaatggatttaccaaatggaatccattcattaggatatacgaatgtaccagttaaattggataaagaagttgaaggtacaattcgcgtacacacagttgaacaataaagttggattgaaataagaggtgtaaccattcatggatagaatgtatgagcaaaatcaaatgccgcataacaatgaagctgaacagtctgtcttaggttcaattattatcgatccagaattgattaatactactcaggaagttttgcttcctgagtcgttttataggggtgcccatcaacatattttccgtgcaatgatgcacttaaatgaagataataaagaaattgatgttgtaacattgatggatcaattatcgacggaaggtacgttgaatgaagcgggtggcccgcaatatcttgcagagttatctataaatgtaccaacgacgcgaaatgttcagtattatactgatatcgtttctaagcatgcattaaaacgtagattgattcaaactgcagatagtattgccaatgatggatataatgatgaacttgaactagatgcgattttaagtgatgcagaacgtcgaattttagagctatcatcttctcgtgaaagcgatggctttaaagacattcgagacgtcttaggacaagtgtatgaaacagctgaagagcttgatcaaaatagtggtcaaacaccaggtatacctacaggatatcgagatttagaccaaatgacagcagggttcaaccgaaatgatttaattatccttgcagcgcgtccatctgtaggtaagactgcgttcgcacttaatattgcacaaaaagttgcaacgcatgaagatatgtatacagttggtattttctcactagagatgggtgctgatcagttagccacacgtatgatttgtagttctggtaatgttgactcaaaccgcttaagaacgggtactatgactgaggaagattggagtcgttttactatagcggtaggtaaattatcacgtacgaagatttttattgatgatacaccgggtattcgaattaatgatttacgttctaaatgtcgtcgattaaagcaagaacatggcttagacatgattgtgattgactacttacagttgattcaaggtagtggttcacgtgcgtccgataacagacaacaggaagtttctgaaatctctcgtacattaaaagcattagcccgtgaattagaatgtccagttatcgcattaagtcagttatctcgtggtgttgaacaacgacaagataaacgtccaatgatgagtgatattcgtgaatctggttcgattgagcaagatgctgatatcgttgcgttcttataccgtgatgattactataaccgtggtggcgatgaagatgatgacgatgatggtggtttcgagccacaaacgaatgatgaaaacggtgaaattgaaattatcattgctaagcaacgtaacggtccaacaggcacagttaagttacactttatgaaacaatataataaatttaccgatatcgattatgcacatgcagatatgatgtaaaaaaagtttttccgtacaataatcattacgatgataaaattgtacggtttttattttgttctgaacgggttgatatatgttaagtttgtgtattgaaagtgataaattagtactgtcaacgcctctgttaaagggtttttaggacgttgaagacgatttgttaaaatgatttttcttttaaaaaggccgaaaatcaatgttcgatttttatttgcattatggtctcgatattggtagaatatcaaatggttaaatgagaaaaacttggaggtgctcacatgtcatcaatcgtagtagttgggacacaatggggagacgaaggaaaaggaaaaataacggatttcttggcagaacagtcagatgttatcgcgcgtttttcaggtggtaataatgcaggccataccattcaatttggcggagaaacatataaattacatttagtaccatctggtatcttttacaaagacaaattagcggtaatcggtaacggtgtcgttgttgatccagttgcactattgaaagaattagacggattaaatgaacgtggcattcctacaagtaatttacgtatatctaatcgtgcgcaagtgattttaccatatcacttagcacaagatgaatatgaagaacgtttacgcggtgacaataagattggtacaactaaaaaaggtatcggtccagcatatgtagacaaagttcaacgtatcggtattcgtatggcagatttacttgaaaaagaaacattcgaaagattattaaaatcaaacattgaatataaacaagcatatttcaaaggtatgtttaacgaaacatgtccatcatttgatgatatctttgaagaatactatgctgcaggtcaacgtttaaaagaatttgtaacagacacatcaaaaatcttagacgatgcatttgtagcagatgaaaaggtacttttcgaaggtgcgcaaggtgtaatgttagatatcgaccatggtacatatccattcgttacatcaagtaatccaattgcaggtaacgttactgttggtacaggtgtaggtcctacattcgtttcaaaggtaattggtgtatgtaaagcttatacatcacgtgttggtgatggtccattccctactgaattattcgatgaagatggacatcatattagagaagttggtcgtgaatatggtacaacaacaggacgtccacgtcgtgtaggttggtttgattcagttgtattacgtcactctcgtcgtgtaagtggtattacagatttatctattaactcaatcgatgttttaacaggcctagacacagtgaaaatctgtacagcttatgaattagatggtaaagaaattactgagtacccagcaaacttagatcaattaaaacgttgtaaaccaatctttgaagagttaccaggttggacagaagacgtaacaagtgtgcgtactttagaagaattacctgaaaatgcacgtaaatatttagagcgtatttcagaattatgtaatgtacaaatttctatcttctcagttggtccagatagagaacaaacaaacctattaaaagaattgtggtagaactttatataagtcatacacaatgattataaatacatgagccttctatgtttattggtaggaggcttttgttatgtttgcttctgtatcgattcgattatttagataaaaattactaacgtaaaggtgatatttgctagtcataatttaaaagattagatgatatttaacgaaattaagaagaaatacttgaatgtaataagtctgatgtcgaaaatagctattaaaatagagtagacgtaagtgtaaatgaaagtacctaaaatagaaaaatttcaaaaatagcgtaattattataataaatagacagccaataaaatgcaatttttcacttataacattcttcaaaaaataatagcaaaattatgtaaaaaatatcttgtcatggcaagattggctgtgctataatctatcttgtgcttaagaacggctccttggtcaagcggttaagacaccgccctttcacggcggtaacacgggttcgagtcccgtaggagtcaccattttttaggtctcgtagtgtagcggttaacacgcctgcctgtcacgcaggagatcgcgggttcgattcccgtcgagaccgtacaaatgcctatccaagaggataggcatttttttgcgtttaatattatattaataaaagatatatggacgaatgataatcatattgatttatctgttcgtccattttctttaaaatgtatgaacctcaagtaacttagtggttggatatgaaagataaacgtagacaataaaatctttattagacgtacaaacatatgctactgtcaacatatttcttcgttgtgatatgccaccagtcctccataacatcaattgttaaagtaacgaataacgaataatgatatttattttctgagcaatgacgtgcaactagaagttgccattatcctaattttattattggaatagagacctcatcattgtgttaaatatcattgtcacaatccgccgtgagaaactaataaaaaatattaatatataagtttatattggaaaatagaattaatagcttataaatggtaaattatataataggttactatacgttataagacggaaaatgcgcacaataacaaaaatagtaagcgacatcctgtgattttttacacaaacataaacgataaagaacaaaaaatgataaaataatattaatgatttaagaaaagaggtttatgcaaatggctagaaaagttgttgtagttgatgatgaaaaaccgattgctgatattttagaatttaacttaaaaaaagaaggatacgatgtgtactgtgcatacgatggtaacgatgcagtcgacttaatttatgaagaagaaccagacatcgtattattagatatcatgttacctggtcgtgatggtatggaagtatgtcgtgaagtgcgcaaaaaatacgaaatgccaattataatgcttactgctaaagattcagaaattgataaagtgcttggtttagaactaggtgcagatgactatgtaacgaaaccgtttagtacacgtgaattaatcgctcgtgtgaaagcgaacttacgtcgtcattactcacaaccagcacaagacactggaaatgtaacgaatgaaatcacaattaaagatattgtgatttatccagacgcatattctattaaaaaacgtggcgaagatattgaattaacacatcgtgaatttgaattgttccattatttatcaaaacatatgggacaagtaatgacacgtgaacatttattacaaacagtatggggctatgattactttggcgatgtacgtacggtcgatgtaacgattcgtcgtttacgtgaaaagattgaagatgatccgtcacatcctgaatatattgtgacgcgtagaggcgttggatatttcctccaacaacatgagtagaggtcgaaacgaatgaagtggctaaaacaactacaatcccttcatactaaacttgtaattgtttatgtattactgattatcattggtatgcaaattatcgggctgtattttacaaataatcttgaaaaagagctgcttgataattttaagaagaatattacgcagtacgctaaacaattagaaattagtattgaaaaagtatatgacgaaaagggctccgtaaatgcacaaaaagatattcaaaatttattaagtgagtatgccaaccgtcaagaaattggagaaattcgttttatagataaagaccaaattattattgcgacgacgaagcagtctaaccgtagtctaatcaatcaaaaagcgaatgatagttctgtccaaaaagcactatcactaggacaatcaaacgatcatttaattttaaaagattatggcggtggtaaggaccgtgtctgggtatataatatccccgttaaagtcgataaaaaggtaattggtaatatttatatcgaatcaaaaattaatgacgtttataaccaattaaataatataaatcaaatattcattgttggtacagctatttcattattaatcacagtcatcctaggattctttatagcgcgaacgattaccaaaccaatcaccgatatgcgtaaccagacggttgaaatgtccagaggtaactatacgcaacgtgtgaagatttatggtaatgatgaaattggcgaattagctttagcatttaataacttgtctaaacgtgtacaagaagcgcaggctaatactgaaagtgagaaacgtagactggactcagttatcacccatatgagtgatggtattattgcaacagaccgccgtggacgtattcgtatcgtcaatgatatggcacttaagatgcttggtatggcgaaagaagacatcattggatattacatgttaagtgtattaagtcttgaagatgaatttaaacttgaagaaattcaagagaataatgatagtttcttattagatttaaatgaagaagaaggtctaatcgcacgtgttaactttagtacgattgtgcaggaaacaggatttgtaactggttatatcgctgtgttacatgacgttactgaacaacaacaagttgaacgtgaacgtcgtgaatttgttgccaatgtatcacatgagttacgtacacctttaacttctatgaatagttacattgaagcacttgaagaaggtgcatggaaagatgaggaacttgcgccacaatttttatctgttacccgtgaagaaacagaacgaatgattcgactggtcaatgacttgctacagttatctaaaatggataatgagtctgatcaaatcaacaaagaaattatcgactttaacatgttcattaataaaattattaatcgacatgaaatgtctgcgaaagatacaacatttattcgagatattccgaaaaagacgattttcacagaatttgatcctgataaaatgacgcaagtatttgataatgtcattacaaatgcgatgaaatattctagaggcgataaacgtgtcgagttccacgtgaaacaaaatccactttataatcgaatgacgattcgtattaaagataatggcattggtattcctatcaataaagtcgataagatattcgaccgattctatcgtgtagataaggcacgtacgcgtaaaatgggtggtactggattaggactagccatttcgaaagagattgtggaagcgcacaatggtcgtatttgggcaaacagtgtagaaggtcaaggtacatctatctttatcacacttccatgtgaagtcattgaagacggtgattgggatgaataataaggagcatattaaatctgtcattttagcgctactcgtcttgatgagtgtcgtattgacatatatggtatggaacttttctcctgatattgcaaatgtcgacaatacagatagtaagaagagtgaaacgaaacctttaacgacacctatgacagccaaaatggatacaactattacgccatttcagattattcattcgaaaaatgatcatccagaaggtacgatcgcgacggtttctaatgtgaataagctgacgaaacctttgaaaaataaagaagtgaagtccgtggaacatgttcgtcgtgatcataacttgatgattcctgatttgagcagtgattttacattattcgattttacgtatgatttaccgttatcaacatatcttggtcaagtactgaacatgaatgcgaaagtaccaaatcatttcaatttcaatcgtttggtcatagatcatgatgctgatgataatatcgtgctttatgctataagcaaagatcgccacgattacgtaaaattaacaactacaacgaaaaatgatcattttttagatgcattagcagcagtgaaaaaagatatgcaaccatacacagatatcatcacaaacaaagatacaattgatcgtacgacgcatgtttttgcaccaagtaaacctgaaaagttaaaaacatatcgcatggtatttaacacgattagtgttgagaaaatgaatgctatactatttgacgattcaaccatcgttcgtagttcaaagagtggtgttacaacctacaacaataatacaggtgtcgcaaactataacgataaaaatgaaaaataccattataaaaacttatccgaagatgaagcaagttccagcaaaatggaagaaacgattccaggaacctttgattttattaatggtcatggtggtttcttaaacgaagacttcagattgtttagtacgaataatcagtcaggcgagctaacatatcaacgtttccttaatggttatccaacgtttaataaagaaggctctaatcaaattcaagtcacttggggtgaaaaaggcgtctttgactatcgtcgttcgttattacgcaccgacgttgttttaaacagtgaagataataaaacgttgccgaaattagagtctgtacgttcaagcttagcgaacaatagtgatattaattttgaaaaagtaacaaacatcgctatcggttacgaaatgcaggataactcagatcataatcacattgaagtgcagattaacagtgaactcgtaccgcgttggtatgtagaatatgatggcgaatggtatgtttataacgatgggaggcttgaataaatgaactggaaactgacgaagacacttttcattttcgtgtttattcttgtcaacatcgtgttagtatcgatttatgttaataaagtcaatcgctcacacattaatgaggttgagagtaacaatgaagttaattttcagcaagaagaaattaaagtaccggctagtattttgaataaatcagttaaaggtataaaattagagcaaattacagggcgatcaaaagactttagttctaaagctaaaggcgattcggatttgaccacatcagatggtggaaaattattaaatgcgaacattagtcaatcggtaaaggtcagtgacaataacttaaaagatttgaaagattatgttaacaaacgtgtgttcaaaggttcagaatatcaattaagtgaaattagttctggttctgtaaaatacgaacaaacgtatgataatttcccgattttgaacaatagtaaagcgatgttgaactttaatatagaagataacaaagcgactagttataaacaatcaatgatggatgacattaagcccacagatggtgcagataagaagcatcaagttattagtgtgagaaaagcaatcgaggcattatattataatcgttacttgaaaaaaggtgatgaagtcattaatgctagacttggttactattcagtcgtgaatgaaacgaatgttcaattgttacaaccaaactgggaaattaaagtgaagcatgacggtaaggacaaaacgaatacttactatgtcgaagcgacaaataataaccctaaaattattaatcattaatatgaatcgtaataagctagcattgcaagctcatcatatgtgagaagcagtgctagctttttgctggtacggtttattatggctgacgtttctgtgtctccaacgtgcgcatttattcatattttaagtagaaccgcattgtaaaaatagtgtaactgctattttaaaaactttaatatttgtctaatcattgttataataattaagaaattcattgcatgtgattatcaaaatttaaatataagaaaccggtcgatgaactaaagttacataataggaaaggtatacaaaacagctaatatactgatagtttctgtagggaaaatcgtatatttgcactgatgtatattgcagtcatatagagagattgactgcttaaagagaaaggatgagccgcttgatacgcatgagtgtattagcaagtggtagtacaggtaacgccacttttgtagaaaatgaaaaaggtagtctattagttgatgttggtttgactggcaagaaaatggaagaattgtttagtcaaattgaccgtaatattcaagatttaaatggtattttagtaacccatgaacatattgatcatattaaaggattaggtgttttggcgcgtaaatatcaattgccaatttatgcgaatgaaaagacttggcaggcaattgaaaagaaagatagtcgcatccctatggatcagaaattcatttttaatccttatgaaacaaaatctattgcaggtttcgatgttgaatcgtttaacgtgtcacatgatgcgatagatccgcaattttatattttccataataactataagaagtttacgattttaacggatacgggttacgtgtctgatcgtatgaaaggtatgatacgtggcagcgatgcgtttatttttgagagtaatcatgacgtcgatatgttgagaatgtgtcgttatccatggaagacgaaacaacgtattttaggcgatatgggtcatgtatctaatgaggatgcgggtcatgcgatgacagacgtgattacaggtaacacgaaacgtatttacttatcgcatttatcacaagataataatatgaaagatttggcgcgtatgagtgttggtcaagtattgaacgaacacgatattgatacggaaaaagaagtattgctatgtgatacggataaagctattccaacgccaatatatacaatataaatgagagacaccctataaagttccgcattgctgtgagacgactttatcgggtgctttttttatgttgttggtgggaaatggctgttgttgagattaaggttctagttgaaatgtaaaaaataattcgatattaaatgtaatttataaataatttacataaaatcaatcattttaatataaggattatgataatatattggtgtatgacagttaatggagggaacgaaatgaaagctttattacttaaaacaagtgtatggctcgttttgctttttagtgtgatgggattatggcatgtctcgaacgcggctgagcaacatacaccaatgaaagcacatgcagtaacaacgatagaccaagcagcaacagataagcaattagtaccaccaaccaaggaagcagctcatcaatttggtgaagaagcggcaaccaacgtatcagcatcagcacagggaacagctgatgaaataaacaataaagtaacatccaacgcattttctaacaaaccatctacagcagtttcaacaaaagtaaacgaaacgcacgatgtagatacacaacaagcctcaacacaaaaaccaactcaatcagcaacattcacattatcaaatgctaaaacagcatcactttcaccacgaatgtttgctgccaatgtaccacaaacaacaacacataaaatattacatacaaatgatatccatggccgactagccgaagaaaaagggcgtgtcatcggtatggctaaattaaaaacagtaaaagaacaagaaaagcctgatttaatgttagacgcaggagacgccttccaaggtttaccgctttcaaaccagtctaaaggtgaagaaatggctaaagcaatgaatgcagtaggttatgatgctatggcagtcggtaaccacgaatttgactttggatacgaccagttgaaaaaattagagggtatgttagacttcccgatgctaagtactaacgtttacaaagatgggaaacgcgcgtttaagccttcaacgattgtaacgaaaaatggtattcgttatggaattattggcgtaacgacaccagaaacaaagacgaaaacaagacctgaaggcattaaaggtgttgaatttagagatccattacaaagtgtgacagcagaaatgatgcgtatttataaagacgtagatacatttgttgttatatcacatttagggattgatccttcaacgcaagaaacatggcgtggtgattacttagtgaaacaattaagtcaaaatccacaattgaagaaacgtattacagttattgatggtcattcacataccgtacttcaaaatggtcaaatttataacaatgatgcattggcacaaacaggtacagcacttgcgaatatcggtaagattacatttaattaccgcaatggagaggtatcgaatattaagccgtcattgattaatgttaaagacgttgaaaatgtgacaccgaacaaagcattagctgaacaaattaatcaagctgatcaaacatttagagcacaaacagcagaggttattattccaaataatacgattgatttcaaaggagaaagagatgacgttagaacgcgtgaaacaaatttaggaaacgcgattgcagatgctatggaagcatatggcgttaagaatttctctaaaaagactgactttgccgtgacaaatggtggaggtattcgtgcctctatcgcaaaaggtaaggtgacacgctatgatttaatctcagtattaccatttggaaatacgattgcgcaaattgatgtaaaaggttcagacgtctggacggctttcgaacatagtttaggcgcaccaacaacacaaaaagatggtaagacagtattaacagcgaatggtggtttactacatatctctgattcaatccgtgtttactatgatatgaataaaccatctggcaaacgaattaacgctattcaaattttaaataaagagacaggtaagtttgaaaatattgatttaaaacgtgtatatcatgtaacgatgaatgacttcacagcatcaggtggcgacggatatagtatgttcggcggacctagagaagaaggtatttcattagaccaagtactagcaagttatttaaaaacagctaacttagctaagtatgatacgacagaaccacaacgtatgttattagataaaccagcagtaagtgaacaaccagctaaaggacaacaaggtagcaaaggtagtgagtctggtaaagatgcacaaccaattggtgacgacaaagtgatggatccagcgaaacaaacagcttcaggtaaagttgtgttgttaccagcgcatagaggaactgttagtagcggtacagagggttctgattgcgcattagaaggaactgctgtatcaagtaagagtgggaaacaattgactaaaatgtcagcgtctaaaggtagcgggcatgagaaacagttaccaaaaactggaactgatcaaagttcaagcccagcagcgatgtttgtattagtagcaggtataggtttaatcgcgactgtacgacgtagaaaagctagctaaaatatattgaaaacaatactactgtatttcttaaataagaggtacggtagtgtttttttatggaaaaaagctataaccgttgataaatatgggatataaaaacggggataagtaataagacatcaaggtatttatccacagaaatggggatagttatccagaattgtgtacaatttaaagagaaatacccacaatacccacagagttacccacaaatacacaagttatacactgaaaaatgggcataaatgtcagaaaaatatcaaaaacagcaaaaattattgttataataagaggggacagtgtgaacaagttaataacttgtggataactggcgagttgataacaatttggaggaccaaacgacatgaaaatcaccattttagctgtagggaaactaaaagagaaatattggaagcaagccatagcagaatatgaaaaacgtttaggcccatacaccaagatagacatcatagaagttccagacgaaaaagcaccagaaaatatgagcgacaaagaaattgagcaagtaaaagaaaaagaaggccaacgaatactagccaaaatcaaaccacaatcaacagtcattacattagaaatacaaggaaagatgctatcttccgaaggattggcacaagaattgaaccaacgcatgacccaagggcaaagcgactttgtattcgtcattggtggatcaaacggcctgcacaaggacgtcttacaacgcagtaactacgcactatcattcagcaaaatgacatttccacatcaaatgatacgggttgtgttaattgagcaagtgtatagagcatttaagattatgcgaggagaagcatatcataaatgatgcggttttttcagccgcttcataaagggattttgaatgtatcagaacatatgaggtttatgtgaattgctgttatgtttttaagaagcttatcataagtaatgaggttcatgatttttgacatagttagcctccgcagtctttcatttcaagtaaataatagcgaaatattctttatactgaatacttatagtgaagcaaagttctagctttgagaaaattctttctgcaactaaatatagtaaattacggtaaaatataaataagtacatattgaagaaaatgagacataatatattttataataggagggaatttcaaatgatagacaactttatgcaggtccttaaattaattaaagagaaacgtaccaataatgtagttaaaaaatctgattgggataaaggtgatctatataaaactttagtccatgataagttacccaagcagttaaaagtgcatataaaagaagataaatattcagttgtagggaaggttgctactgggaactatagtaaagttccttggatttcaatatatgatgagaatataacaaaagaaacaaaggatggatattatttggtatatctttttcatccggaaggagaaggcatatacttatctttgaatcaaggatggtcaaagataagtgatatgtttccgcgggataaaaatgctgcaaaacaaagagcattaactttatcttccgaactcaataaatatattacatcaaatgaatttaatactggaagattttattacgcagaaaataaagattcatcttatgatttaaaaaatgattatccatcaggatattctcatggatcaataagattcaaatattatgatttgaatgaaggattcacagaagaagatatgctagaggatttaaagaaatttttagaactatttaatgaattagcttcaaaagttacaaaaacatcctatgatagcttggtcaatagcatagacgaaatacaggaagacagcgaaattgaagaaattagaacagcacaaaaagataagacactcaaggaagtggaagcacctaaaggaataattccaaaatataaaaaaggtgtatcaaagactactaaaaatgattcagaaattgaaaaatcaaataaagagaataaattaaccggtaaagttggagaaaaattagcgctaaattactttaatgagctaattgataataaaatagacgaagataagaaagaacagtttaggaatattttaaatgataatccaggctctcaacacggtcatggctatgatttagtagcttttgatccaacaaatacagataaagctgtagaaaaatttattgaaattaaaacatctacatcttctagtattgaggaaccattttttatgtcgctaaatgaaatgtttgctatgaaagaatataagcagaaatatttaatattaagaatatttaatgtttccggtaaagaaccacaattttattttatagatccatatgcaaattattctgaatttaaagatgtagatgatctcattgacaaagtatttaatgtagaagctattcagtataaagtttttggcgaaaaatgattacttgaacaagagctaaaataaaattgtgatctaataaaaatagaaactgtaatttaaataaaactttctaaataagctaactgataaaaaatcagtttgtccacagtctgaaacaagattcctatattctttaggaatcttgttttttctatttttatggtgataaagagcagataagataatgtgtaataatcacaaaaaagttaaatattttaaggcttgtttaattattaatgattttatatataaagagcagtataataaagttgttaatatattatgaataatattcaagtaattttattgttttttaatttgtcgatatttaagttgagttaaatttaaagggtgtaatttgttttacaatgatgaagataattagtctatcaaaataaaggggttgggactgttatgagtgataatttgtcattattcattgactatatcaatgataatataatctatggtagtgaaatcaaacgggagaaattagagaatttatttaatcaatttgctataaaaaatgttgaaaagaacattgtctatgatgaactgaaatctttagatattacaatcattgagtcacaggattcatataaaaataaattgaagagattattttcggttctgttgcaaagtaaaaaaatatagctaaccactaatttatcatgtcagtgttcgcttaacttgctagcatgatgctaatttcgtggcatggcgaaaatccgtagatctgaagagacctgcggttctttttatatagagcgtaaatacattcaataccttttaaagtattctttgctgtattgatactttgataccttgtctttcttactttaatatgacggtgatcttgctcaatgaggttattcagatatttcgatgtacaatgacagtcaggtttaagtttaaaagctttaattactttagccattgctaccttcgttgaaggtgcctgatctgtaattaccttttgaggtttaccaaattgtttaatgagacgtttgataaacgcatatgctgaatgattatctcgttgcttacgcaaccaaatatctaatgtatgtccctctgcatcaatggcacgatataaatagctccattttccttttattttgatgtacgtctcatcaatacgccatttgtaataagcttttttatgctttttcttccaaatttgatacaaaattggggcatattcttgaacccaacggtagaccgttgaatgatgaacgtttacaccacgttcccttaatatttcagatatatcacgataactcaatgtatatcttagatagtagccaacggctacagtgataacatccttgttaaattgtttatatctgaaatagttcatacagaagactcctttttgttaaaattatactataaattcaactttgcaacagaaccatctaatcttcaacaaactggcccgtttgttgaactactctttaataaaataatttttccgttcccaattccacattgcaataatagaaaatccatcttcatcggctttttcgtcatcatctgtatgaatcaaatcgccttcttctgtgtcatcaaggtttaattttttatgtatttcttttaacaaaccaccataggagattaaccttttacggtgtaaaccttcctccaaatcagacaaacgttacaaattcttttcttcatcatcggtcataaaatccgtatcctttacaggatattttgcagtttcgtcaattgccgattgtatatccgatttatatttatttttcggtcgaatcatttgaacttttacatttggatcatagtctaatttcattgcctttttccaaaattgaatccattgtttttgattcacgtagttttctgtattcttaaaataagttggttccacacataccaatacatgcatgtgctgattataagaattatctttattatttattgtcacttccgttgcacgcataaaaccaacaagatttttattaatttttttatattgcatcattcggcgaaatccttgagccatatctgacaaactcttatttaattcttcgccatcataaacatttttaactgttaatgtgagaaacaaccaacgaactgttggcttttgtttaataacttcagcaacaaccttttgtgactgaatgccatgtttcattgctctcctccagttgcacattggacaaagcctggatttacaaaaccacactcgatacaactttctttcgcctgtttcacgattttgtttatactctaatatttcagcacaatcttttactctttcagcctttttaaattcaagaatatgcagaagttcaaagtaatcaacattagcgattttcttttctctccatggtctcacttttccactttttgtcttgtccactaaaacccttgatttttcatctgaataaatgctactattaggacacataatattaaaagaaaccccccatctatttagttatttgtttagtcacttataactttaacagatgggggtttttctgtggaaccaattttaagggttttcaatactttaaaacacatacataccaacacttcaacgcacctttcagcaactaaaataaaaatgacgttatttctatatgtatcaagataagaaagaacaagttcaaaaccatcaaaaaaagacaccttttcaggtgctttttttattttataaactcattccctgatctcgacttcgttctttttttacctctcggttatgagttagttcaaattcgttctttttaggttctaaatcgtgtttttcttggaattgtgctgttttatcctttaccttgtctacaaaccccttaaaaacgtttttaaaggcttttaagccgtctgtacgttccttaaggaattccttagtgctttcatagattaaactcacatcacgctttaaatcgcttattttagactttaaagacttgttttcttcaatcaactcattataatcatttacattttcattaaatcgctctacaagaccactatatttttctttaacttgcccatgttctttacttaattttttatattctctcgccatatcagtactcatgagatttctaacatgctgttttaacctatcgttatctctcgcagcagtcactaagtttttataatcacgctccgatataacaacatttttggttggtttcttttctgttttcattatttcttttcccaaaccaaacatagacttttcacccgttggcacttcaacacttttcatgtgtcgtttcgctggtacttctaaatctgatttaactttatcgctataagcagtccattcatcttttttaactgctaaatttttttctagaaaatcaatctctttttccaaagtttgttttttaaatttagctgtctcaatatgtttacggtcagagccacgttcaccacgcttcaactcaaaaccctgttttttcatatgctcggggaatttatcttgtagccataacagttcttgacgattaaacacattttttccttgcagttttccatcacgcataggcacaacacctaaatgcatgtgaggggtttgctcatcattatgaactgttgcataagcaatattttgcttgccatatcgttcggaaaataatttataactttcctcaaaaaatcgtttttgttctcctggatccagttgctcaaaaaaatctcggtcagatgttactagcaactcatttacaagaacagcatctttcctcgtttttcttgtacctgttttttgtgattcaataatttctttgacacgttcgttgtaatcaatatttttatcatttttcaaatcataattttcacgtgttcgctcatggtcaatatcatcattcgttctactttttcgctctctttgattatgaaattgcatgccttttagtccagctgatttcactttttgcattctacaaactgcataactcatatgtaaatcgctcctttttaggtggcacaaatgtgaggcattttcgctctttccggcaaccacttccaagtaaagtataacacactatactttatattcataaagtgtgtgctctgcgaggctgtcggcagtgccgaccaaaaccataaaacctttaagacctttcttttttttacgagaaaaaagaaacaaaaaaacctgccctctgccacctcagcaaaggggggttttgctctcgtgctcgtttaaaaatcagcaagggacaggtagtattttttgagaagatcactcaaaaaatctccacctttaaacccttgccaatttttattttgtccgttttgtctagcttaccgaaagccagactcagcaagaataaaatttttattgtctttcggttttctagtgtaacggacaaaaccactcaaaataaaaaagatacaagagaggtctctcgtatcttttattcagcaatcgcgcccgattgctgaacagattaataatagattttagctttttatttgttgaaaaaagctaatcaaattgttgtcgggatcaattactgcaaagtctcgttcatcccaccactgatcttttaatgatgtattggggtgcaaaatgcccaaaggcttaatatgttgatataattcatcaattccctctacttcaatgcggcaactagcagtaccagcaataaacgactccgcacctgtacaaaccggtgaatcattactacgagagcgccagccttcatcacttgcctcccatagatgaatccgaacctcattacacattagaactgcgaatccatcttcatggtgaaccaaagtgaaacctagtttatcgcaataaaaacctatactctttttaatatccccgactggcaatgccgggatagactgtaacattctcacgcataaaatcccctttcattttctaatgtaaatctattaccttattattaattcaattcgctcataattaatcctttttcttattacgcaaaatggcccgatttaagcacaccctttattccgttaatgcgccatgacagccatgataattactaatactaggagaagttaataaatacgtaaccaacatgattaacaattattagaggtcatcgttcaaaatggtatgcgttttgacacatccactatatatccgtgtcgttctgtccactcctgaatcccattccagaaattctctagcgattccagaagtttctcagagtcggaaagttgaccagacattacgaactggcacagatggtcataacctgaaggaagatctgattgcttaactgcttcagttaagaccgaagcgctcgtcgtataacagatgcgatgatgcagaccaatcaacatggcacctgccattgctacctgtacagtcaaggatggtagaaatgttgtcggtccttgcacacgaatattacgccatttgcctgcatattcaaacagctcttctacgataagggcacaaatcgcatcgtggaacgtttgggcttctaccgatttagcagtttgatacactttctctaagtatccacctgaatcataaatcggcaaaatagagaaaaattgaccatgtgtaagaggccaatctgattccacctgagatgcataatctagtagaatctcttcgctatcaaaattcacttccaccttccactcaccggttgtccattcatggctgaactctgcttcctctgttgacatgacacacatcatctcaatatccgaatagggcccatcagtctgacgaccaagagagccataaacaccaatagccttaacatcatccccatatttatccaatattcgttccttaatttcatgaacaatcttcattctttcttctctagtcattattattggtccattcactattctcattcccttttcagataattttagatttgcttttctaaataagaatatttggagagcaccgttcttattcagctattaataactcgtcttcctaagcatccttcaatccttttaataacaattatagcatctaatcggttctgttgcaaagtaaaaaaatatagctaaccactaatttatcatgtcagtgttcgcttaacttgctagcatgatgctaatttcgtggcatggcgaaaatccgtagatctgaagagacctgcggttctttttatatagagcgtaaatacattcaataccttttaaagtattctttgctgtattgatactttgataccttgtctttcttactttaatatgacggtgatcttgctcaatgaggttattcagatatttcgatgtacaatgacagtcaggtttaagtttaaaagctttaattactttagccattgctaccttcgttgaaggtgcctgatctgtaattaccttttgaggtttaccaaattgtttaatgagacgtttgataaacgcatatgctgaatgattatctcgttgcttacgcaaccaaatatctaatgtatgtccctctgcatcaatggcacgatataaatagctccattttccttttattttgatgtacgtctcatcaatacgccatttgtaattaagcttttttatgctttttcttccaaatttgatacaaaattggggcatattcttgaacccaacggtagaccgttgaatgatgaacgtttacaccacgttcccttaatatttcagatatatcacgataactcaatgtatatcttagatagtagccaacggctacagtgataacatccttgttaaattgtttatatctgaaatagttcatacagaagactcctttttgttaaaattatactataaattcaactttgcaacagaaccaagcagaacaaagtagatttaaaggtatcattgcatctggcatgcatacactttcaatatcatttaaattatgggtagaagaaggtaaatacggagaagaagttgtagcaggaacacaaatgaataacgttaaatttattaaacctgtatacccaggtaatacattgtacgttatcgctgaaattacaaataagaaatccataaaaaaagaaaatggactcgttacagtgtcactttcaacatacaatgaaaatgaagaaattgtatttaagggagaagtaacagcacttattaataattcataataaaacagtgaagcaaccatcgttacggattgcttcactgttttgttattcatctatatcgtattttttattaccgttctcatatagctcatcatacactttacctgagattttggcattgtagctagccattcctttatcttgtacatctttaacattaatagccatcatcatgtttggattatctttatcatatgatataaaccacccaatttgtctgccagtttctccttgtttcattttgagttctgcagtaccggatttgccaattaagtttgcataagatctataaatatcttctttatgtgttttatttacgacttgttgcataccatcagttaatagattgatattttctttggaaataatatttttcttccaaactttgtttttcgtgtcttttaataagtgaggtgcgttaatattgccattattttctaatgcgctatagattgaaaggatctgtactgggttaatcagtatttcaccttgtccgtaacctgaatcagctaataatatttcattatctaaatttttgtttgaaatttgagcattataaaatggataatcacttggtatatcttcaccaacacctagttttttcatgcctttttcaaatttcttactgcctaattcgagtgctactctagcaaagaaaatgttatctgatgattctattgcttgttttaagtcgatattaccatttaccacttcatatcttgtaacgttgtaaccaccccaagatttatctttttgccaacctttaccatcgattttataacttgttttatcgtctaatgttttgttatttaacccaatcattgctgttaatattttttgagttgaacctggtgaagttgtaatctggaacttgttgagcagaggttcttttttatcttcggttaatttattatattcttcgttactcatgccatacataaatggatagacgtcatatgaaggtgtgcttacaagtgctaataattcacctgtttgagggtggatagcagtacctgagccataatcatttttcatgttgttataaatactcttttgaactttagcatcaatagttagttgaatatctttgccatcttttttctttttctctattaatgtatgtgcgattgtattgctattatcgtcaacgattgtgacacgatagccatcttcatgttggagctttttatcgtaaagtttttcgagtccctttttaccaataactgcatcatctttatagcctttatattctttttgttttaattcttcagagttaatgggaccaacataacctaatagatgtgaagtcgcttttcctagaggatagttacgactttctgtttcattagttgtaagatgaaatttttttgcgaaatcacttaaatattcatccatttttttaacggttttaagtggaacgaaggtatcatcttgtacccaattttgatccatttgttgtttgatatagtcttcagaaatacttagttctttagcgattgctttataatcttttttagatacattctttggaacgatgcctatctcatatgctgttcctgtattggccaattccacattgtttcggtctaaaattttaccacgttctgattttaaattttcaatatgtatgctttggtctttctgcattcctggaataatgacgctatgatcccaatctaacttccacataccatcttctttaacaaaattaaattgaacgttgcgatcaatgttaccgtagtttgttttaattttatattgagcatctactcgttttttatttttagatactttttttattttacgatcctgaatgtttatatctttaacgcctaaactattatatatttttatcggacgttcagtcatttctacttcaccattatcgcttttagaaatataactgctatctttataaacttgtttgaaatttttatcttcaattgcatcaatagtattattaatttctttatcttttgaagcataaaaatatataccaaacccgacaactacaactattaaaataagtggaacaatttttatctttttcatcaatatactccttatataagactacatttgtagtatattacaaatgtagtatttatgtcaaaataatgttataatttttgtgatatggaggtgtagaaggtgttatcatcttttttaatgttaagtataatcagttcattgctcacgatatgtgtaatttttttagtgagaatgctctatataaaatatactcaaaatattatgtcacataagatttggttattagtgctcgtctccacgttaattccattaataccattttacaaaatatcgaattttacattttcaaaagatatgatgaatcgaaatgtatctgacacgacttcttcggttagtcatatgttagatggtcaacaatcatctgttacgaaagacttagcaattaatgttaatcagtttgagacctcaaatataacgtatatgattcttttgatatgggtatttggtagtttgttgtgcttattttatatgattaaggcattccgacaaattgatgttattaaaagttcgtcattggaatcgtcatatcttaatgaacgacttaaagtatgtcaaagtaagatgcagttctacaaaaagcatataacaattagttatagttcaaacattgataatccgatggtatttggtttagtgaaatcccaaattgtactaccaactgtcgtagtcgaaaccatgaatgacaaagaaattgaatatattattctacatgaactatcacatgtgaaaagtcatgacttaatattcaaccagctttatgttgtttttaaaatgatattctggtttaatcctgcactatatataagtaaaacaatgatggacaatgactgtgaaaaagtatgtgatagaaacgttttaaaaattttgaatcgccatgaacatatacgttatggtgaatcgatattaaaatgctctattttaaaatctcagcacataaataatgtggcagcacaatatttactaggttttaattcaaatattaaagaacgtgttaagtatattgcactttatgattcaatgcctaaacctaatcgaaacaagcgtattgttgcgtatattgtatgtagtatatcgagcttcacatgaaacagctaaagaagctttgggcgataaagagttaagagccattgcacatgagttaactaaaacagttaaggataacatgagtgttgattggtctaaacgagacagtgctaaagctaaaatgagagttcaagttagacgcctattaaagaaatatggctatccaccagatcttcaaaaaatggctgtggaacaagttgtagagcaagcagaattaatggcaagtcagcaataaaaaaataaatcataaacatactaagattagctatgaagaaatctatgacgatagattttttcatagctattttttatagttatagagagaagtagactgtccagactcttggattttaaatccgtataaaaaacaagtcagctttactctcgccttttgaaattcgtttgtagtatgttgggttcttgaaaccgtgtataggaaaatgaaatgagaaaggttgagtaaagtttttagcttctcaattattcaaaggaggtttttttatcgattacttaggtgttgatattagtaaaagaagtagtgtagttgcacattataaaaatggaaaattccaaaaagagtttttcatccaaaataataaaaatggttacaattatttactcaagtatttgaatgacttacaccacccacaactcatttttgaatctacaggtatctattcaagaggtatgcaacgattttgttgtgtaaatcaaattaactatattcaaatgaatccgttagaagccaaatttaaaacgagcactctaagatcatggaaaactgatcaggcagatgctcataagcttgcttgtttaggaccgacgcttaaacaaacaggcaacttacctatacatgagttaatattctttgaattaagagaacgcgtccgttttcatctagaaatcgagaatgaacaaaatcgacttaaatttcagatccttgaattactccatcaaacattccctggtttagaaagattatttagtagtcgatattcaatcattgcactcaacatcgcagaaatctttactcatccagacatggttcttgatatcgacaaggatgtactgattacacatatattcaattctacagataagggaatgtcaatggataaagctacaaaatatgcacttcaattaagagtgattgctcaagaaagctatcctaatgtcgatagacattcctttctagtcgaaaaattacgcttacttattcaacaattaaaacaatctattcatcatctcaaacaattagatgatgccatgattcaattagcacaacaactcgattattttgaaaatattcattcgatacctggtattggtaagctaagcacagctatgattattggggagattggtgatattaagcgatttaaatcaaataaacaactcaatgcttttgttggcattgatatcaaacgatatcaatcaggtcatacacactgtagagataccatcaacaagcgtggtaataaaaaagcgagaaaacttttattttgggtgattatgaatataataagagggcagcatcattatgacaatcatgtcgtcgattattactacaaactaagaaagcagcctaatgagaaacctcataagactgccatcattgcttgtataaatcgattattaaaaacaattcattatcttgtaatgaatcataaattgtacgattatcaaatgtcaccacattagccaaacgtacaatcaaatgtagtttaacaccttattcaaaaaaattaaaatgaacggtttagttaagtaatgcttattttaattataagtacttgactaatcgtaggaatgagtccgggacataaagttcttggataagtgaaaaaagacaatttctattgaaataatatagaaattgtcttttttataaattttttgattattttcagctcgttgagctactacttttcttatattaagtgccattaatacaaaaccaagttctcttttgactttattgagtcctcggacagacatccgagtgaaacccaaaatagccttcataaatccaaaaacaggttccacatcaatttttctttgactgtagatattttttgtttctggttctgaaagctttttgttaatttgggatttaaaatattcccagttataattcttcattatttttttgtttgtttttgaattgaagttcatacattgatttttcagaggacattctgaacaatcatcacattcatataatttgaagtctcgcttataaccatacttatcatgacgataggcatatcttttaaaacctagccgtttattattcggacaaatgaattcgtcattaatttcgtcatagttccaattttgagtattaaagatgtcacttttatattttttagttttatcttttataaacattccatatgttatgagtggcgttcgattaaagtcatctataattgccttataatttgattcactaccataacctgcatcagctacaatatattcaggtaaatgaccgtaggtctcttgaattgaatttaaaaatggaatcatcgttctagtatccgttggattttgatacacattataagataaaacaaattgggaatttgttgctatttgtaaattataccctggcttaagttgtccatttttcatgtgatcttctttcattctcataaatgtcgcatcataatctgtcttagaataactatttctatcctttaaaatagatttttgaaattcgtatcgatactttcgctcaaaataatcattgatttgctttttgtattttttgattttagttcttttgagacgtatttgttttcttgttttagtacatttttcattgttgatatgttggtttaaatcttcgatttctttatctaagtgactaccaatcaaatctatttcttcttttgttaattcattatcatgatcttctttaatttccggtatgattttattggttaccaattcatggtagagggctttagaatcctcattcatctttgattcatggttttgaatactctttttccatacaaatgtatatcgattggcatttgcttcaatttttgtaccatcaataaaaatagctttatcatctataagattttgttttacacactgactgtaaaattgaataaataaagattctaataaagcatctacttttggatttactctaaattgattaattgttttataagaaggtttttgattttgtgatagccacatcattcggatgctatcattaagcattttttctattttacgacctgagaatacagattgtgtgtaggcatatagaatcacttttaacatcattttaggatggtacgaagttgcaccacggtgatgtctgaattcgtcgaattcattgtcaggaattgtttcaacaatatcatttacagtaaaacgatgttgatttgttttgtttccatattgacctccatgtatttgctatgatttcaaaatccatttttgacgtgccttagggttgagtggatgcataatttcatttgttactggattgatgagcttttttactttctttttatgaggttttaacatttccatcacttgttcgacacggtcgataacaactggtcgcttcgcataggcaccataagcaagaatcactgtgtcactttcactaatcgctttcatcaaatgaatatcagtgtgctcatcgtatggatttttgatatgtttgaggttttcgggtgttctaatattagagaatagatttacaagatatacagcaccgtatcgttctgaattggctaattggttgaggataagaacagttgtgagatcgagtgataatacaccgtctaaatgaggatacatcgttatcactgtgcatgcagctttcttttcatcccatgttttcttgagtaaatagcggtgctgttcatcatcgctaaatatggcttctgtgtgtatcgtacttttgattgtattcatcatcgtcacttcctttagtattcttctggtaaaagcatcacataataaaaagcgtccacgtcatcttcacgaatgacgtagactttcttaggtaatgcattttgatttttttcatagtttgtatagtgatattccaatttgtatgtgggttgttcttgttcatgtgtgattgagagtatattctcatcttcttgtaatttaaaaatgtgtaggtaatctgtatgaggctggttatcttttttttctaccatgtgccaaagtaagatttgaaggtctagtggaatactttcattaattcctcttgtgatgtatcgattgattttcatgctatttccctcccttctgcttttctttcatgatgtcgatgatttcgttgataactgtgacggataattgagcaactatgatccaattattcatggtcctgacctccttgttttagtaaatgacgttcatcaataatgatattttgagtatctgtaaggtacagaaagtccatgtcaaaatggtctaagtatccgacactgatgagttggttattggcatacattagaaatggatagatacttagctcatgtagttcatcattatagtaggtataagtctcgagtgtgagatgtaccagtggagaatcattaataaaacgttccggtagaatattttctgctgcttcctccagcgcttcacattcccaagcttcgttattagatagttggaataggtgggttatatattgtttgagttcttgagtgatggttttcatattattgcctcctagatagtgtaatagtgatgtagttcatatacatcattgagataatatatatttgatttgtcatttattacgaatcccggtgggaataagagaaaattccatataaaaacccgctacaaacgttggtatgccaaggaaatcctgaaattccgcctattttgacaaacaatcaactcattatttataagtattgatgatagggttgtgtctctgcttccttatatatattatttatttataaaaagtaacgggattttgggattgtgcttgcacaatccttctgtttcttcgaatctgcaaatcccaatcatttcccgataaaaaatcattgtgggatgttctttagcaatttcaatataagcattgtatagttatgaaaaaattacgacaataactgtttcattagataagtgttattgaaattgataaagagcaattcttgaaaatagttagataaaataagcgaaagaatatagtgaaaattattgttataacaatgattctattagctaaatagtaagatatagtgtttggggcaaaaataaagacgaagtgctgagatgcacttcgtcgagttgtttattattgaaaagttgtttaatgatttcgttattaagtttgagtgtgacatagaattgttttttatgattaccatcttttttaatatcaatgcgatcaatcactgatagatacaatgctttgagtcgagatttttctatgtgcttaatatcatgaaagatgtgttgtaatagtttactgatttctttggcatcaaataaagtcttatcttcattttgttgatttttgagttggttgatttgattcgtaatgtcattgagttgcttttcatatttttgaatacttggtctgattactgatgttaagtccggattatcctcgatggttttaatcaagttatttattttgatttgtacttcatcatattgttgttgcttataagcaatatcgtgatgaagtgcagcgccatcaacttgattttcttgattgacgtgtgttactacgcgttgaatgactttatcacttttgactatttcaagtatttgcttcattacataatcttcaatcacatcagctcttacactgtttgccgaacatactttggaacccttgttccgaaaattactacatgaatagtaacgaatacgtttcttggtcccatctttaagtgtattcgttgtattgcttgctgccataggtgcgccacattggggacagtggataatgcctgtaagcagattcgttcctttaccatgaacttggggtttttgactgacttgttttttacgcatttgtactttatcccataaatcttgattaataatgggggaatgcttaccttcagctatcactggtttatcattcagccctttacgacgtttttcactccaatctttgtatttcgcaaattgaattttgccgatatagaaagggttagctaagatgtatgtgattgaactaatactgaaaggtttcccctttttagtgacatatcctttgtgattcaatgcattggcaattttacgatagccatgtcctttggcatagcactcgaatatatattttacaatattagcttcatgttggttaatcattagctcgtgtttactatctggtattttgtcataacctagtggtaaattgccttgataatagccttcttgggcacgtctcgtttgacccataaatacgttctcgacaatgttattacgttcgaattctgagaaactcgcaagtatctgtaacatgagtttaccagaagaagtattgacttccatacgctctgacaaactgaaaaattcgacattttgtttgtgtaaatcttcgacaattttgagaagatcagatgtattacgagctaatcggtttgttttgtataccataacacagtcgatattgccttcttttgcatctttcaacatacgttggagctcaggtctgttcatagatttacctgaaataccacgatcagcgtatatatctttgacctcaaaatgatggaagtcacagtattctttgatttgattgatttgtccatcgatactataaccttctgtgctttgcatttctgttgaaacacgtacatagataccgacacgttttgttttaagttgttgcattatgtttcatcctttcttcgtttatgcaattgatgattgcatggtttgattgacgatattgagtggttcatttttgaaatagattcctataagatttttatctttcgcaatgtgaatggtttcaatataggggtacaatatgtttaacgtgaaacgtttttgaataatattttgaatggtgtgttgtatttgatgctcactgatggatgtgatgcgttgtggttgttgatgtaatgattgcatttgttttctaaacgtttctgcatcgatgatgccttgtgccaacttttctatcagttgttcttgagtcaatgtgtgatgcttttctatgtttctttgtcttttgatgcgtttgtcaatcgcatttttaatttttacgtagatatgttggtcttgataaaagtcttggcacacttttaatactttatcttccaatgtctgtgcattgatgcctttgaaatcacagacaaagcgtgaagcattcatatttttaggacagacgtagtaacgtaatatatgattcttttttctaacggtcatatttgtaagtgttgcattacaacatgggcatttgattttttgtttgagttgattatccgaagatgtctgtttggtttgtttttgcgatcgaagtctctgcgcttgctcatatatacttgtggaaacaatagaaggaaacatattgtcgaattggccatattgattgttgacacgaccacaataattaggattgatgataatgttacgaacttgatagggttgtcgattgatatacgtgttatcttcttctaataactgtgcaattttcttataaccatggcctttaatgtaataattgaatacagcctttaccgttggtgactcattttgattgatgatgaatgttccgttgtgataatcgtaaccaaaaggtgcatgtgttgtaatcaatcgaccttgctttgctttttcttgaagcccatttctgacttgttctccaatgttatccgattcaagttcggctaaactgatgaagatattaagcttgagtcggtcgaaagcttgatccatatcaaagtaaccatcatgtacgcttaagatatgaacatggtacgtttgacataatttgatgagttttaatgcatttttcagattacgatgcaacctattaagacgataacagcataatatgtcacattgtccttgttgaattaattgtgttaattgtcgatacccactacgattatctttgcgtcctgattgtttgtcgctataaaagttgatatgttgaatatgatgtttttcggctattgcttcgatagcttgtttctgtgctgcaagagattgttgtttcatcgtactttgacgtaaatagcctatgacttgtttcatatcggctcctcctttcacagtgataatatatatttatggatgaattgatatataagcccaacatcaatgagatgttgggcgtccatattagtcattcgtttgattgatttcttcaattactaaatcggctaatatctcgataagttcatccatgtttttcactccgttatttgttctatcttcaatacgtcgattattcagtttgatgcttcacagttgtatgataaagacaattagaaatcttcgtgaactcctgaagggcctatcccttcattagcggatttaaaaagttctttcgcagctttgttatcatttgacggtgtccaattttgaagtaacgacttatctttagttaatccgaggatagatgcaaactctacatctaattttagatggtaaaatacaagtgattgttttttaccgctattatctttgacacttcttttagttgtttggcgtccacggtcagctaatatgaaacctttatctcttaaggcgttgacaacattattaacatcttgaaattgatgattgtttagcatctgtttaaaaacgttcgcaatcatttttacttcgatatggtcatcttttaatgagattaatccatagttctcaaacatatttttcaaagcaccttcatctgaaaacttacctctgttttgtgccacaaattgaatgatgacatcaatagctttatcagctaatgagcgttcagagactgtatgagtatgataatcaataaagtagtctcttatattagcgatatcaatatctgtagataaaacacgacctaatattttcgcagatgttgtaatgactgcataacgcttaaacatacgaatacctgtattgtttgtttcgtctttcaatttagcttcaaaccaatctacttccttgtaaaaccattgaataacttcatcttcacgatttataagatatttagctactaacggtaaaacatgaccatagtttagtgctacagcttttttaatattgtcagcattggtcgcatttgtagtgaattgttcattaatctcgatggttcttacacgtaatccatcgttttgagctgaatcattaaaaatactgtattctgacgttgaaatgacagaagtaccccaattcttaggcgttttaacttctccatgaacgtttgaacgttgacgaccttgaccttcagtgatggagtacaataaccccgttgtatctctaaaagttgctgatgagagttcatcaaatacaataggtataccaaaattgttactcaagtaaccttcaagtgcattacgtgtggcattccaacttctaaagagagtttcattacctttggtgggattaccagcgactgatacagctaaagaagctgcagttgacttaccggttgaggattgacctgtaaaactaaaaatgattccggcaaattcggtttcatgtttgtgcttcaggaaactcgtcactaaggcagaaataccaaatacgactgctaattctaaaagaagagaacctttaacctcttttagatacatgttataccaattatcaaatgtacctttaggagttaagtcataagcattatcacaaatggcgtcagatggagatttattatcaaattctttagtagtatagatttcacttaacgatacaataggaccaaacggtgtttccagtatacctaccccttcatataagtaggaaatgggtaattgattgcgcatttgttgcatcgcataacctaaatcttttgtatatttttcattaatactaaatccatacttcattaaagatggcaatttttgtgtcgttaaaatatcactagattcaacaatttctttttgatcttcgtctgtgataattagtttttcagtattagttttagggtcaataaacttattttcgataacgataggacctgcgatttcaacttcagtaggcattcctcctttttcttttgggggcgtgtctttataccaacctttttttgatttgtatcgtggtgaaggattaaatgaaaggttagtttgagccattagcaatcacctcctttcgaagagttgctgttatggtgtggattaggacctgttttaagataaactaagtgaccgtgagtatccttaccgataataataaatggaacacgtggcgcatgttttacaaaatatgcgaaccaacgtccaacattttgttgtacagcttttgaacattgtacatttgcacgactgttcaagtcatgaaatgtaaattcttctccttcaggtaaattgaatgaaatacctaatattttcttttttaactgctcgaatttatctgattgattgaaatacatttaacttcctcctactaatgaactaagataggaaaattaaatatgcgcacaattaactttcttaagttcattttagccaagaagttatcatttgaaagcttgtaaaaatatgttagaaattccgtactaaattaagatggatttttgttgacaaaataaaaaacgctgatttaacagcgctttaaataaaaattaatctgaagttatataaaagtagtcagaaggagtggtgttattatcattataataatctagtgctttattgatttcttttattaatttatcatgatgttcttttgttattttctttggatatttgagttctttttcttctaagtcttttggagacactaggtcactatttaaaattaatgataacagcatatttttaggtgccgaagctctggtgtctcgatgagtaatatattttgctaaattactgtttatacttactttttcattttctaaaaagtttgtactatttttcacatgagcatcagcaattttggtacttatttcagtgtttaaatcgtctatttcatctaaataatattcaagaatctgaagtttatctttagaagtgatacctttttcagtgaaaatcttaataatgatagatttgattccaatttctatattactgtctactagaaaatagagataataattagtcagagcatgttcataatctctttgatcagtaatttcatgattgatgaaataatataagttctctttgatacgattagaagaatctatatctttgtcattgataccgtttttaaaaaagtgtagataaactgagttgtttgagagtatatcatataatacaaataaactttttggtttaaatacatatgattttcctgatttaaagtttgctatgtttattcctagagcgttgcagaatttattaaaattagttgtaaaattatttttttcttgaataaacatgtcgttgtcatttaattctgaactatgatttttaatcatattgatattttcttcaatcttgtcactatttaaattttccatgcaaagtatactatatcttactatatcacttatatttatggaaaaatctttaggagaacgatttaaagtatcctttttattatcttgatctacagccctacatgaatcatcaaaaacttctttgacatttattttatcaatgttcaaaattatgtctactaatgcattttgaaatttttcattatatatgtctctcttattcataatatcactacctttatcaattataataatatattatatcttaatatttgtagaagtacttgatgagaggttagataaaacaccacatttctctggttagtaaaaacataacttctaagactttttttcatatactaataaattatattataaatatttttgaacataaaaggagtgtataaaaatgtatgcaaagaaggtgttttagtatagattttaaggcattcatttttaatataaaatatttataatatttaaaattgaaaatgattatcctttcaaaatttttgcaacgagtaattttactttagttatattataaagtagaattaatagtaattaaaggaacgtttgttcctgtttttatatgtaaatacgagaacgattgaatagataaagaaggataaaattgacttcgaaatagaatatttaatttcaagaaggagagtattggatgttaaagcataaaataataaatttaatacaagaaaagagagaagggagttactgggattttaaagcagaatatcataaagataaagcagaattattacatgatataatttgtttatcaaataacttgttgaatcaagaagcttatttaattttaggagtcgcagataacggtcatattctgggggttgcaggtgattcaaatcgaaaaaaccaagaagaattaatatcatttattactggaaaaaaatttgctgcgggtaggcaccccaagatttcattaatgacatttgaatatgaagaaaaggaaatcgatgtcattataataaatcctaaaggatatgtaccatactatctggagaaagcagaaaccgatcaaaaaagtaaaaaaacaaaacagtcaatgcaggtagcatttatacaagagttgaagataaaaataccccaatagattctactgcaagtccattagatacagaaatattatggaaaatgcattttggtttatatcctactcctataaagaggttacagaattatttactaactcctgagaaatggatgcagaactcaacaggttattttcatagtgaatcgccagagtatatagtatacaaaaatgaggacattgaagaaaaagaaaattattttaatttagtaagtccattttatgcgtataatcaaatcaatagtaacactttatactcatattacgaatttaaatatcatagtacagttttatatggttgccggtgtatctctttagattcaggtatctacacaacaccagtacctgaactaggtgagataaattttaatatgcatagagatgatactatttattatcgttatttcattgaagagacgatgctttataatattcatctttttatgtataagggtgattcgatggaagagaaatttgcaatggataaatttttagaatgtgttttggtttataaaagtgatgtagaaaaggaactttttgaaaattatatattagataattgggataaagttaatcagtcaattaatgaaaataataaacgtgtatttggaactgaacatttgtcacaacttgaaaaagaagatatcactaaaaaagtaaaaacagttaaagttttaaaagatgaacttgagaactttagaacttgagaaaaattattggttaataggagaaaatcatgaaaaaatcaacactcattgataaatttttagacttactttcttcaagaagctcactcagagaaattcagaataattttattgatgcaaacattatgagagatagttctataaatcaaaaatataacggacaacgtaaatcgttagcgtgggaatatattagtactttaaatttagaagatgaagctgaattttctaaattacttaatgttatagaaacgtatttgtttcaatggaatctgtatatccatgaagttgatgaagacgaagaaattaatagattaataaaaatagttaatgtattaggttatgaatataataaagatacaggaaaaataactaaaaatgaaagagaagttaatttaagtactattaaatctttggcaataaaatttgatattgaatatgtattaaaagaatgtaatagaattgaaaaagaggcactaacggatccagaggacgcaattacatctgcaaaatcgatggttgagagtactttgaagcatattttagattctgaaggagaaaaatttaataataatgaaaccttgagaggtttatataaaaaagtaagtaatattatgaatctttctcctggtggacataatgaaaatacttttaaaacaattttgagtggaatgataaatgtaattaacggtctggacgaagtaaggaatgaatatggtgacgcacatggtaaatcaaagaaaaattataggcctgaaactagacatgcttttctagcaatcaacgcagcacgtacgataactgaatttcttttagcttcatataaaaagtaaaagctatttgatgaatagcaatcaaatatattggttataaaaaaccgcatcatcaactgataagcagaggcgtatcataagtaggaggataagaaagagatgacttaaatgttttataactcattttatgtaaaatatcgacaacaaataaccatcactaataaatgtaatggagggaatttatggtaagagaaaatggtggagcaaatgctcaaagagggtttaactatcaaaattgtgtaatttctttagtagcaattagaaattataagaaaccaaatttcaaaatttatgttgaagcagatgaagatttcgaagtaaattatggcgatgattatcatgcatgtatacaagttaaaggagaaaaaaatttaacctttaacaagcttttaaaaggtgaaaacgggaagctttcaatatttgaaaaaaatctttcatctgggaaatcagattctgtatataaaatagttgtttttagctttagccgaaaagatatggaaagcatgcaggaacaaacagatgaagaagaactgttttcaaactcttggttactatcaaatgatcaaaaaaataaagtgaataatgatcgtgttgaaaatttttcattggtaaaaacagcatttgataacgatatgaagaatgctaggatatatttaaagggagaattagtacaacaaaatatagttgttgagggtagagccgaagtaatacttaatgaattatttcaacaaattcttcaaaagtctgaaaaaaaagttcaaactgaacaagataaagaactgaaaaaaataacgtcaaaagaattagatttgattttacagaaaataactgcaaaagctcgttttgaaaaagaattaaaaaatttaagatttaattcgttgaaagaagagaaaattaaaaaggaagagaagaaaataattttagaatacatggctgtaaaaaaagctgttataagatttttgaaatctgatgaagaaaagttggaaaataattccattagtacattaatatctgaaacatttaatttgtcagaaatgaattgtttatcagagaatactaaatatgccattgctatatcggcttattgcgatattttagaggagattgcatatgaataaattaacaataataagtttatcgatacttgataataaagaaaaaaaagcaaataagtttgaattttcagaaaaatctaatttgataattagcgaaaggaacggggaagggaaatctagccttataaaatcaatacagtattgtttaggatcaaatttaaaagcgtttccaaaaggatgggactacaaaaattatgtttttcaattagaaatagttattgataaaaataagatattgattcagagatataataatataataacagttttagatgatgggaaaattaaaaagtttggatacttaaaagactattctgattggtttcaagataagatggagatgaatttaaaattagttagtaagaataaaaatacttctagtttagcttcactggaagctattttgagcccattgtatattgatcaagataaatcatgggatggaattctatataagaactcatttgagggtttagcacaatataaaagtcaaagttttcctaaagaagtatttgaatactatttaggtatttctaataatataatgaatgataaaataaataaactcaataaatatagagagaaatcgaaagaaaaaaagtgaaaattgaacaagtagattctgtatataaaaattatagttctcaaaaaaacatttcgaaaacgataccaaaagaatttgaagagtttaaaaaacaagtagatttctatattaaagaaacagatcgattttctcaaatgatcactcaaaaaacagacaagttatctaaagaaaaaatgaagcttgatattttacaacaagacagggaagaattgagaaaattattaacaaaaacaaaaaaagattatcagaagtaagttatgaatgtacttattgtcattcagtactaacaagaggccaatccttaacaaggatggaattagatgataataagatagaaatattattacgaaaagatagtataaatcaagaaataataaaaatagaaaacaatattcaaaagaaattaatagaaattcaaaatcttgagaatcaatttgaactttatcatgaacgtctttcagaattaaagcaattatcgaatattgataattatgtaaatcaaaaagtattacaagaattagaaacattaaaaattgaagaagttattgaattgaaagaaatagatcaggaaataaaaagcttaagaaatgaaatttcaaagcttaaaaagagtttaaaaactgatttagaaaatattaatcaaaaatttaaaaaactaaaaaataaaatatcactacaaatggaaactacgggactgtctgaaaaaaaagtattaaactttaataaattaaatggtagcggaacatttctaaataaagatttattaacattatatctggtttatatgaaccttctagatagtatggaagattttggtttgccatttgctattgattcatttgtaaaaaatgagacagactcaatagcattagaaaaaatgtttggtgcaattgataaatattttttgacattaaataaccaaacatttttttcaataataaaagaaaatttaaagtttatagaaaatcctgttaatgagataaaaatagagagacctttattaaaagagaaatttttttctgatatagagaaagaactaattcaaaatttaaatattttatagaaaaaatataataatattacgtgtaaatgactagtataatataggaaaatgacgaaatgaaaatgttgtttttcctatattttttctttttaaaattatataatcatttcctaactcaacctttgataggagatcaaatgattgtgactcaagaacagttaaaagatattatgaagtaggtaaagaaaatgaattagaacgagtaaaaaggaggaaacttaaattcctcctttccccttattacatctataattcaattttaacgtcttcgtccatttgggcttcaaattcatctagaagtgctcgtgcttctgcaattgattgtgtgttcatcaattgatggcgaagttcgctagcgcctcttatgccacgcacatagattttaaagaatctacgcaagctcttgaattgtcgtatttcatctttttcatatttgttaaacaatgataaatgcaatctcaatagatctaatagttccttgcttgtgtgttcgcgtggttctttttcaaaagcgaatggattatggaaaatgcctctaccaatcatgacaccatcgatgccatatttttctgccagttcaagtcctgtttttctatcgggaatatcaccgttaattgttaacaatgtatttggtgcaatttcgtcacgtaaatttttaatagcttcgattaattcccaatgtgcatctactttactcatttctttacgtgtacgaagatgaatagataaattggcaatatcttgttcgaagacgtgcttcaaccaatctttccattcatcgatttcatagtagccaaggcgtgttttaacacttaccggaagcccacctgctttagttgcttgaataatttcggcagcgacatccggtcttaagattaagccggaacccttaccctttttagcaacatttgctacaggacatcccatatttaagtcaatgcctttaaagcccattttagctagttgaatactcgtttcacggaactgttctggcttatctccccatatatgagcgaccatcgggtgttcatcttcgctaaaagttaagcgtccgcgcacactatgtatgccttcagggtggcaaaagctttcagtatttgtaaattcagtgaaaaacacatccggtctagctgcttcacttacaacgtgtcgaaagacgatatctgtaacgtcttccattggcgccaaaataaaaaatggacgtggtaattcactccaaaaattttctttcataatatatttataccctctttataattagtatctcgattttttatgcatgatgatattaccacaaaagcctaacttatacaaaaggaatttcaatagttgcaaccatttgaaagggaagtctaagagtagtctaaaataaatgttgtggtaagttgatcaatacaaagatcaaggattatagtattaaattgttcattattaatgatacactacttatgaatatgattcagaattttctttggctacttttacagtaaagcgattttttagttatcttataacaaagacaaatttataaaggtgatattatggaaggtttaaagcattctttaaaaagtttaggttggtgggatttattttttgcgatacctatgtttctgctattcgcataccttccaaactataattttataactatatttcttaacattgttatcattattttcttttccataggtttgattttaactacgcatataattatagataaaattaagagcaacacgaaatgattcattaatacgaatgtgattaaacgtaaaactgaaggagcgattacaatggctactgaaaaagatataaatgatttgtttttaaatcatgtgaattcaaacgcggttaagacaagaaagatgatgggagaatatattatttattatgatggtgttgttataggtggtttgtatgataatagattattggtcaaggcgactaaaagcgcccagcagaaattgcaagataatacattagtttccccatatccaggtgctaaagaaatgatattaattccagactttaccgaagcaacaaatctcactgatttatttaagaccataaaaaatgatttgaaaaactaatcattaattgtcatattcaactattttgaaaagtatcaatttcacattatcaaattattgagtatctcaatttattgttatacacaaacagtatttttgttatcatagagttaataaatataataaattaaacaagtaactttacaaaaattagaatgatttaattcaatcacaattatttgaaaatagaggtgagcaggtgaacgatatgttaattagtcttgtaaccccagtttttgctttgctagttattggtggtattatttgggtgattatagaaggtatagtacatatttcaaaaaagaataaagcaatcgataactttttaaaccaagttaataaagtaagtgagacatataaattcgctactacttttttatttctaatcttggctacggcgggtatttctcaattttatctatattatatagtatcagcgtttcttttttggcttgtcatacttacctttggtattgcaggtatcatttttttaatgccatatggattatgttttctaccgttttataagcaaaaaaagaaaaaacagacatttaaaaaatacatggtttacactacgattggtttgtcaatttgtctaggcttatctctagttttggttcacactacgaaaatttatatggacgaaggtggcgtaagatactattacggtagttttgtaatgaaacaagcgggcggttatgcttatttagctttagcagtactttcaacgttgttaattgttgcgaaaaaagctacaaataaaaataaagaaatcgaaaccgtcgacaatacaaatataatggaaagataattaagggagtgctcattcaggagtgctcttttttggtgttcaaatttagttggaaatgaagaagtagaaacatttgtgagtggaaaataaaagttaagctgaaatcctatcgaaagtatctgtaaagtaaaaaattaacgccacaattgtcaacgtaattaaaaacagacatcctaattacatgctttttcaaacaataatctaataataagtccatctacaaaatatttctacgcactaaaaaaggcggactaaatcgtccgcctcaatgcacactaccgcatgttgtttttatagagtttctttatagaatgattcaagttttggtaacacttgatttacgtattctggaatatcatataaatctacgtgtgatgcaccttcaattttatataattcattgttgtcgcctgctgctttttcaacagcatcaacgctatattcaatcgtgtctgcttctgtacctgcgattgctaagaatggttgtgtcaacaattcatcaatatatgtgaatggcgcaaatgttaatacttctgaaaaacttcttaataatagtttgtttggtgcgtttttatgttgaccacgtgcagttaaataataatcatgcccttgtaccattgttgaattttcaggcatagaatcatcaatttcttcaggcacatagccagtgataccataatctgcaccatttgcttcagctgtacgttgatctgcaacttgtgtcataaatgccagttgatcatctattgatactacatcgccaggacctttacggaataaagcgccaatatctaccatacttacagttgcaagtgctttaatgcgacgttctgttcttgctgcacttactgtatatccaccacctgcacaaacgccaagcgcaccaattctgtcattatccacaaagtctaatgttgtaagataatcaactgaagctctaacgtcttctgttctcgcaaatggatcttctaaatatctaggagagccttcactttcaccttgatgtgatgcatcatatacaaccgtaacgtagccgaattccgcaagtttctctgcatacatacctgctgtttgttctttaacaccgccacctgggtgacaaactgtaattgctggatattttttgctttcatcaaattgttctggtgtatataaattcgctgctaataaatttgttttacttttaaaattaactgattgtttcatagattaaatgcctccatctttttatataagtcgttcatttgttgtagatatttattactcttgtgtgtataatgccatactagagtatttaaatgtacaattcaattaacaaggaagcacatatgtattttaatacacagttttataaaaatgggttttaaaagaaaggagtattattatgaatgttggggatttacgggttgttaaaacgagggcaagtattaaaaaggcatttataaccttactttttgaaaaagattttgatactatttcgattaaagaaattactgaatttgcgcaaattgggagaaaaacattttatctacattatattgataaatatgatttactagatcaaatagtatcggaaaaattgacagaacttgaacaaatttctgaagccaaaaagagtctgggtatccaagaaggcacacagttatggtttgagtttttcgaaaataatagaacattttttatgaaaatttttaatatcaacaacgcttcaaattataagaaaaagctgcttcattttattgaagaagaatttaagaaaaaagttccgacacgtgttgctactgaaaaaggcttagactacgacttatatattaattttattagtaacggtattatcggactactagatatctatctaaacagcagtgaaaatacagaagaacaagaaaaaataacattgcaggtgtcgcgcctactatctttgtacgatttaatttaaaaataagctatctattttgaaatataattgcgtgtagcagatatagtatgtcacttctttagagaattttattataatagttttatgaattgatattgcagtgacaagagctaaaaaagaattttatgtaattggtgacatgcaaagaatacagatgaacccattttatgagacgatttttaaagaaagaaatgttaaataacatacaaaaaagtatatagaggaagttatgttcatgcaaaatagaaatgattttatagaaaaactattagacagagctcaaattaaagatggcatgcgtgtactggatataggttgtgcgactggtgaggtcactcaattaattgcaaaacgtgtgggggcgaatggtgaagtcgtcggtgttgatgtgaatgagtcattacttaaaatcgcaaatgaaaacaatcaatataacaatgtatcatatcaatattctgatatatatcaattgccagaaactatggggcattttgatgcgattgttggtagaagagtattaatgtacttaccagatgctgaaaagtgtttacaaattttgaaatcaattttaaaacctgagggtatattatgttttcaagaaagtgatgctattaatacaggcgttggtgcagatgcactacctttacatcaatcagcaattcaatggatttgggaaacggtgaagcaagaaggtggcaatattcatatcggtcaaaatttatataatttgtttaataataatggaatgcatgttgtagattattttgcagaggcagtgattcaaacgtcaatggacaatgatttagcatggcttgtagatgtaatgctaccaagaatgaaagcacatggtgtcattaatgatgatttttcactagatgagtttaaatcaaaccttgaacaagaagcaataaacaatcagtgtgcatttatacgtgacatggcatttggaattatcggaaaagcctagattaaaaaacgctgaaagcagcatattatcatcgctattgttttaacttgtgaagttactaatggattttgaaaataacagcatttctattggctaatcaagtgatacataattaccgagcaatttatacattttaaaaggagcaaaattgaataatggagaaatttaacaactggatattaaatgcaataagtggatctcaaacagacaagaatgaaacaactaaagaattaaaagggtcaaaatttatcattttatatgcatattcaatgctcgttttgcttgcgttagtagtttctaacatattcattcacattttggagcctaaactatcaatcaccactcaaatcatcaccgttttaattttaattgaagcactaattggactacgtttcttgaaagcgtacgatgttaagcgtggcaaagataaagaaaataagaaaaatagtaaggatttcgttaaactaaaatcaattttagtagcaattttatttacatcattggcgctgacagcaggtactgtagctgatatatacggtttcactgacttaggaaatactagaagtgatttaatcgtttggagcataggtggtattatatttggcctcgtatgttacacaatggaagataaaaaataacgataaggagctggcgattataaagctagctcctttttttacttatatatgtaaagaactatctccagagttttgaatcatacgtcattaatttctataattaatacgcttaaatattgtttaaataagttttaaaattttacacatatttttatttaaaaaatatgtataatcaatgtattaaatatagaaagaagttgatgttatgaaaaagtgtattaagactttgtttttaagtatcattttagtagtgatgagtggtttatatcattcagcacatgcgtcagattcgttgagtaaaagtccggaaaattggatgagtaaacttgatgaaagcaaacatttaactgagattaatataccgggttcgcatgatagtggctcattcactttaaaggatccagtaaaatcagtttgggcaaagactcaagataaagattaccttacccaaatgaagtcgggagtcaggttttttgatattagaggtagagcaagtgctgataatatgatttcagttcatcacggcatggtttatttgcatcatgaattaggaaaatttctcgatgatgctaaatattacttgagtgcttatccaaacgaaacaattgtgatgtctatgaaaaaggactacgatagcgattctaaagttacgaagacatttgaagaaatttttagagaatattattataataacccgcaatatcagaatcttttttacacaggaagtaacgcgaatcctactttaaaagagacaaaaggtaaaattgtcctattcaatagaatgggggggacatacataaagagtggttatggtgctgacacttcaggtattcaatgggcagacaatgcgacatttgaaacgaaaattaataatggtagcttaaatttaaaagtacaagatgagtataaagattactatgataaaaaagttgaagctgttaaaaatttattggctaaagctaaaacggatagtaacaaagacaatgtatatgtgaatttcttgagtgtagcgtctggaggcagcgcatttaatagtacttataactatgcgtcacatataaatcctgaaattgcaaaaacgattaaagaaaacgggaaagctagaactggttggctgattgttgactatgcaggatatccgtggcctggatatgatgatatcgtaagtgaaattatagaaagtaataaataaggattcaataatgatattaagacgagtatgaaaatagttagattctaattattttcactactcgtttttattttgaaaataagtaataattcaacaatattataaattgaacagattgtttgtggaatttttgataatattaaagtgaaaaagtgttataaattgataaatatatgtaattaacaaaaacaaatcattttaaaaagaagagagttgtaaggtgatgaaacgtttaaataaattagtgttaggtattagtttcttatttttagtcattagtattactgctggttgtggcataggtaaagaagcggaaataaagaaaagttttgaaaagacattgagtatgtatccaattaaaaatctagaggatttatatgacaaagagggctatcgagatgatcaatttgataaaaatgataagggaacatggattgtaaattctcaaatggcaattcaaaataaaggagaagctctaaaaataaaaggcatgcttttgaagatagatagaaatacaagaagtgcaaaaggattttactatactaatgaaataaagacggagaaatacgaagtagctcaggataatcaaaaaaaatatccagttaaaatgattaataataaattcattccaactaaagatatcaaagatgaaaaaataaaaaagaaatagaaaactttaagtttttcgcgcagtatggcaattttaaagatttaatgaattataaagatggagatatatcatataatccagaggtgccgagttattcagctcaatatcaattaactaatgatgattataatgtaaaacaattacgtaaaagatatgacataccaacaaataacgcgctgaagctgttgttgaaaggtacagggaatttaaaaggttcatcagttggatataaaaaaattgaatttacttttttagagaataaaaatgaaaatatttactttactgatagtctacatcttgaaccgagcgaggataaataatcatcttttaaccagaatatgaaatcaatccaggacaacctaataaaaggagagagttgtaaggttatgaagtgtttaagtaaatgggcattttacattagttttttgatattagtcattagtatcactgctggttgtggcataggtaaagaagcggaaataaagaaaagctttgaaaaaacgttgagtatgtatccgattaaaaatctagaggatttatacgataaggaaggctatcgtgatgatcagtttgataaaaatgataaaggcacatggattgttaattcggaaatggcgactcaaaataagggagaagctttaaaaattaaaggtatggtcttgtatatgaatagaaataccaaaacaacaaaaggatattattatgtaaatgcaataaagaatgataaagacggaagaccccaagagaatgaaaaaaggtacccagttaaaatggtcgataataaaatcattccaacaaaagaaattaaagataaaaacataaaaaaagaaatcgaaaactttaagttctttgttcaatatggaaactttaaagatttgtcgaagtacaaagatggagatatttcatacaatccagaggtgccaagttattcagcaaaatatcaagtaactaatgatgattataatgtaaaacaattacgcaaaagatatgatataccgacgagtaaagctccaaagttattgttaaaaggttcagggaatttaaaaggttcatcagttggatataagaatatagaatttacttttgtagaggaaaaaggtaaaaatatatattttagtgatagcttagattataaaaaaagtggagaagtataattatgtctaaaccagaatatgaaattgatcctggaaaaagagagtgatgaaatgataaaacgtataaacaaattagtgttaggtattagtcttctgtttttaatcatcagtatcaatgctggttgtggcatgggtaaagaagcggaaataaagaaaagttttgagaagacattgagtatgtatccgattaaaaatctagaggatttatacgataaagaaggttatcgtgatgacgaatttgataaaaatgataaaggtacatggattattggttctgaaatggcaactcaaaataagggggaagctctgaaagttaaaggtatggtcttatatatgaatagaaatacaagaagtgcaaaaggattttactatgttaatgcagtaaagaaagatgaagatggtagacctcaggataataaaatagaatatccggtgaaaatggtagacaataaaatcattccaactaaaggtatcaaagacgaacacataaaaaaagaaatcgaaaattttaagttcttcgcgcaatatggcagctttaaagatttgtcgaagtacaaagatggagatatttcatacaatccagaggtaccgagttattcagctaaatatcaattaacgaatgatgattataatgtaaaacaattacgtaaaagatatgatataccaacaaataaatcgccaaagctattgttgaaaggttcgggagacttaaaaggttcatcagttggatataaagatattgaatttactttcgtggagaaaaaaggtgaaaatactttttttactgatagtctacatcttgaaccaagtgaggctaaataatcatgactaaaaaagagtatgaaatcaatcccggtaaaagagcgtgatgaaatgataaaacgtgtaaataaattagtgctaggtattagttttctgcttttaatcatcagtatcgttgctggttgtggtacagggaaagaagcggaaataaagaaaagttttgaaaaaacattgagtatgtatccgattaaaaatctagaggatttatacgataaagaaggctatcgtgatgatcaatttgataaaaacgataaaggcacatggattattaattctgaaatggttgttcaacctaaaggggaacgtatgaaatcaaaaggtatggttctatatatgaatagaaacactaagactacaaccgggaagtatatagtgagtgaaacacttcatgatgaagatggtagacctaagagtaaagataaagaatatcccgttaaaatggtcgacaataaaattataccaactaaagatatcaaagacgaaaaaataaaaaagaaatcgaaaactttaagttttttgttcaatacggcgattttaaagatttgtcgaagtacaaagatggagatatttcatacaatccagaggtaccgagttattcagcaaaatatcaattaactaatgatgattataatgtaaaacaattaagaaaaagatataatataccaacgaataaagcaccaaagttattgttgaaaggtacaggtaatttaaaaggctcatcagttggatataaagatattgaatttacttttgtggagaaaaaaggtgaaaatatatactttagtgatagtctacatcttgaaccaagtgaggataaataacctcctgcctcccacacgattcaacacgaatttcaaatatattgctgtaaaataatgtaaaataaacgtattcatattactgaattgagggatagtatgcaacgtgattatttaattcgagtagaaactgagagtatgtcagatttcaaaaggctcaatagtttaatgattggttttgttattaaaggtgaggcacacatttatgatgaaaataatatgacgcaatgcaacagtggcgacattttcatcattaaccaccgcgacttgtatcgatttcaacttcaacaagatggcatcatatgttatatccaattccaaatgaaatatttagcagacaagtttgatgatgtgcattgtctatattttcacttaacagatgcgaccacaacaaagaatatacatcaactgagaaatataatggcaagactggtttcaacacatatccgacataatgagttgtctaaattgactgagcaacaacttgtgattcagttgcttatgcatatgattcattatgtcccgcgtacatatcattcgaaccaaagtatcttaaatgatgataaagtgaatcaagtatgcgactatatcgagttacattttcatgaagatttaagcctttcagaattaagcgaatacgttgggtggtcagagagccatctgtctaaaaagtttacagaatcgctaggtgtaggattccatcatttcttaaatacgacgcgaattgagcatgcgaaactcgatttgacatacacagatgaaaccattactgatattgcattgcaaaatggcttttcaagtgcagcgagctttgcgagaacatttaaacactttacgcatcaaacacctaaacaatatcgaggtgatcgtccagcaatcactgaaaaccagcaatcggcacaacatgattatcacgaccgtgaattgatattacttataaatgactacattgaagaaatgaatcacttcattgaagatattgaaaagatgaactataaagagattgcctttaaaccaactaatcaacaactaaatcaatttaatcatattattcaagtgggctatttgaggaatttgctcaatacacagtatcaatcacagttgcttacatgtcatcatgattttcaagtcaatgaagtattagcatatgatgtgattccatatatcatgaaaaagctcaatgcgccattcacgtatgatgcagaaatttcgaatatattttatgatattgatttgtgtttagactttttattagatcataactttagtttgaccatgcatttggatcagtatgactcacgtgattatatcgatgcatttaaaatttttatccatcacgttgccctgcatgtcagtcatagaaaagatttgaagttcaacttgtatgtgacgacattgcacacgtctttgattgaaatgattgattattttaaagcattattccctaatggtggcttgtacattcacttagatcaagctacggaaagacatctaccattattgaaacgacttgagccacacatcgaccattttgtatttgatgccaattcaaatgacgctgttgattttaataaaatgaatgatgatgaatttaaaaccgcgagtcaaatgattattaataaaacgaattaccttatcgacttaatgcatcgtcatcgcctaaagcgtccactcattttactcaattggaatacattgacgggtgatacatttattacaaacggcgaatattttagaggtggtatcatcattgagcaattattaaaattaagttctaaagtagagggtatcgggtattggttgaattatgatttgcacgtcagtcattgtaaaaatgaacgggattatatgaattctattgaactatttcatcaatataatggaaaacgtccggtctatttcacggcattgctatttaataaattaacaagcaatattttgtattctgatgatacatgtattgtcacggggactgattcaaattttcaaatattgttatatgatgcaaagcattttaatccgtacttagcgttggacaatcaaatgaatatgcgtgcgacggaaatgattcatttgaacattaatgccctggaagaaggtatgtataagattaaacattttaccttagataaagaaaatggtgcgttatttaatctttggcgcaaacatcatacgatacatggcatggacaaggactctatagattacgttaatcgaatgagttttccgaaattagaagtatatgatatagatatcacggacacactggcattaaacattaaaatgattacgaatgggattcacttaattgaagtaaaacgttacccaagttcataaaatgatcacaaatcacaaattttgatatacataatttgtgattttttatattcaaagctaaaattgcaaaaaattaatggttaacatctctgttgttggcaatataaataatgattaatcatttatgatgtaactaaggagatgaaggatatgaatcaacaattaattgaaactttaaaatctaaagaaggcaaaatgattgagatcagacgttatttacatcagcatccagaattatcttttcatgaagatgaaacggcgaaatacatcgctgaattttacaaaggtaaagatgtggaagtagaaacgaatgtcggaccacgtggaattaaagtaacgattgattcagggaaacctggtaaaacattagcaatccgtgcagactttgacgcattacccattactgaagatacaggattatcttttgcatcacaaaataaaggtgttatgcacgcatgtggtcacgatgcacatacagcatacatgcttgtattagcagagacgcttgctgaaatgaaagatagttttacaggaaaagtcgttgtgatacatcaaccagctgaagaagtaccaccaggcggtgctaaagcaatgattgaaaatggtgtattagacggtgttgatcatgtattaggtgtacacgtcatgagcacaatgaaaacaggtaatgtgtattacagacctggttatgttcaaacaggacgcgcattcttcaaattgaaagttcaaggtaaaggtggtcatggttcatcaccacatatggccaatgatgccattgttgcaggtagctacttcgtcacagcgttacaaacagttgtatctagacgactaaatccatttgaaaccggtgttgtcacaatcggttcatttgacggtaaaggtcaattcaatgtcattaaagatgttgttgaaattgaaggtgatgtacgtggattaacagatgctacaaaagcaacaattgaaaaagaaattaaacgtttatcaaaaggattagaggatatgtatggtgtaacttgcaccttagaatataacgatgattatccagcattatataatgatccagagtttactgagtacgtggctaagacgttgaaagaagcaaaccttgattttggtgttgaaatgtgtgaaccacaaccaccttcagaagactttgcatactatgctaaagaacgcccaagtgcctttatttatacaggtgcagcggtggaaaatggtgaaacttacccacatcatcatcctaaatttaacatttcagaaaaatcattacttatttcggcagaagctgtagggacagttgttttagattaccttaaaggagataactaacatgaatgaaacgtatcgcgggggcaacaagttaatcttaggtattgtattaggtgttattacattttggttgtttgcacaatcacttgtaaatgttgtaccaaatttacaacaaagttttggcacagacatggggacaattagtatagcggtcagtctaactgcactattttcaggtatgtttgtcgttggagcaggtggtctagcagataaaattgggcgcgtgaaaatgacgaatatcggtttattgttaagtattattggttcagcattaattattattacgaatttaccggcattattaattttaggtcgtattatacaaggcgtatcagcagcgtgtattatgccttccacattggccattatgaaaacttattatgagggtgctgaacgtcagcgcgccttaagctactggtctatcggttcttggggtggaagtggtatctgttcactcttcggtggggcagttgcgacaactatgggttggagatggattttcatcttctcaattatcgttgccgtactttcaatgttactcatcaaagggacgcctgaaacgaaatcagaagttaccaatacacataaatttgacgttgcaggtctaattgttctagtagttatgttgctaagtttaaacgttgtcattactaaaggtgcagcacttggttatacatcattatggttctttggtttgattgcaatcgtaattgtagcattctttatgttcttaaaagttgagaaaaaagtagataatccgcttattgattttaaattatttgaaaataaaccatatacaggtgcaacgatttcgaacttcttattaaacggtgttgcaggtacattaattgtagcgaatacattcgtgcaacaaggtttaggttatacagcattgcaggcaggatacttatcaattacttatttaatcatggtgttattgatgattcgagttggtgaaaaattattacaaaaaatgggttctaagcgaccaatgttattaggtacattcattgtggtcattggtattgcacttatttcattagtattcttaccaggcatattttatgttatcagttgtgtcgtaggatatttatgtttcggactaggcttaggtatttatgcaacaccttctacagatacagctatttcgaatgcaccgttagataaagttggcgttgcttcaggtatttataaaatggcttcatcacttggtggcgcattcggtgtcgcaattagtggtgctgtatatgctggtgcagttgctgcaacgagcattcatacaggtgcgatgattgcactttgggttaacgtattaatgggaatcatggcatttatcgcaattttattcgcgattcctaatgatgataaacgtgtcaaagatgcgaaataataacgatgacacgccaagtgttttgataatgatataaatgaaagtaaagcaaattaaatgaggaaatgtatagagcagtgcatatagataaatctatgattggattaacactaatataaatataaatataaatgaaaaaccatccacttaaacttttgataagttaggtggatggttatttattgcgttgttctaaaaatttggacatttatatggaaagaactatatataatgtgaaggttatggcaattcgcttcaatgaaggcgacgtgtaaaagtgtatattaaatgattcgaggtcagactccgagaacagtgtccgtcatgcttaccgcatactaatgaagcatcattatatcagtgtttatagccgatttaagataataaagtttgctaaatataaaagagcttgggacattcaataaaaatcgaattatcatcaataagattttgctttaaacattgactatgaaactggataaataaagattcaattaatgcatcagtattaggatttactctaaaacgattaataattttataagaaggtgtttgattttgagctaaccacatcattcgaatactgtcatgaagtaatttctctattctacgaccagaaaatacagattgagtgtatataagataatttttaacatcatttttggatgataggatgttgcgccacgatggtgtctgaattcatcggattcactatcaggtatcgtttcaacaatttcattaacatatcacgaaatatcattttgaggaattctaacagaagtttctattggtagtgtaagttgggtaaagtgtcttatttttttaaagtatttaaaagtaaaattacatgttaatacgtagtattaatggcgagactcctgagggagcagtgccagtcgaagaccgaggctgagacggcaccctaggaaagcgaagccattcaatacgaagtattgtataaatatagaacagcagtaagatatcttctaattgaaaattatcttactgctgttttttagggatttatgtcccagcctgttttacatgcatctgaatctctaattttaaaaaaatatgaatataaataagacagtaaaaattaaatttcagttgttgcaatttcttcatctgtaggtacatcatcgttaaggccaacaagtgcttcagaaacatttcgtgaatgataaccgatacgttcaagaacaccaatcatatcgatatatagtaatccgccttttgttgtacattcaccacgattaaggcgtttaatatgacctttgcgtagtttatgttcaatattaaatgattctctactacgttctacaatttcatcttttttcgttttgtcataaacatctaacatgtcgatggctttatcaaatgactcagcaacatggttgaataatttatccataccgcgttgtgcatcttctgtaatgcgaatatcttcatcatgttggcgttttaattgagcgacatactcttctgttagctctgctacttttaaaatagagcgattgacatcaaacataactgctaaacgctcaacgtcagccttcgttatggcttttgtagaaattctaactaaataatttcgaatgctatcattgattgtttcaacagcttggtgcttttgttcaagctttttgatcaattttttatcgtcttttgtaatttcgcgaatgtcttcaaacattgataagacaatctgaccaacattttgtaattctttttgagtttcttgtaatgcaacaccaggtgcgtgataaacaagatctttgtttaagtgctgaggtttatagtcatcagcaatatctttacctgggacaagctttgtaacaatccatgctaaacctgctacaaatggtaattgaatcaaagtatttgttatgttgaagataccatgtgatactgcaatcgtcatcgctggttttaagtgccatacatcttgtaacaaactaatcaaatgaatcacaactggcaagaaaattgtgaagataattaccccgattaagttaaagatgacgtgtacaagcgccgcacgttttgcagcgattgagccggctaaactagctaagatagctgtaatcgttgtaccaatattatcgcctagtaacacagggattgctgcgtttaagctaattaaatcttgttgataaaattcttgtaaaataccaatcgtcgcacttgaactttgaactagtgctgttaaccctgcgccgacaatgacagcaagtattggatttgatgacatatcaagcattaattgcttaaatccatctaatgatgctaaaggtttaacggcatcacccataaattctagaccgaagaatagagaaccgaaaccgaatagtatgcggccaatgttattaattttagagcgtttaaagaaaaagattaaaaatgcacctaatgctaaaattggcattgcatattcgcctaaatctataccgataataaatgcagttaccgttgttccgatattagcacccattatcactccaatggcttgtttcaatgtcataaatccagctgttaccagtccgattgtgataactgtcgtacctgaactactttgtattaaaatagttacaacgatacctgcaataacacctaatactggatttgatgtaaatttgtttaaaatatctcgtagcctgtctcctgctgatgcttgaagcccgtctcccatgatttttaagccgtaaaggaaaatacctaaaccacctaaaaaggagaaaatgacttctgtaaccgacatttccattatttcacctcaaataagctttatatttagattatcgcttataattgtaaatttaatgttaagattaggtaaaattatttaacaatatatgttatttgtatatgacttgtaaaatatcgtcacttattatgtaaattttcagtgtgaaatggcaggtttgcaatcacttgtttaacaaaatgatgcaatcaatcatgtaattatgtttcatcaaaaaaatcatgagagtgggataacgaaataatttttatgaaaacattatttctgtcccagtctcatgattcgaaatcaccaaataaaattatttaatgtgcctcgttataacaatttgtgttcttttaataatgtctcaatgtacgtaccttttacctttttaaggaatccagctaatgcgagtttttgcattttcgaatctttagtaatctcacgcaaatcttggtggtcattgagctcatatacagcatccattaagacgcgaagatcaaatggactattgatgacttctgggatgccacggtcgatatttagtagttcataaacagcttccattgcagtacgaaccgaatattctgtagtaaatacagtatctcgctctgtttctgcaaagttaccaataaatgctaagttctgagattgatgcgggacgactaaaggtctgtcgccgatagcacgcgtcatgaaataagaggtgatatatggcatataaacaggaatcgtattagatgcatgttttgctaagtcttcaattttgtcagttgatacacctaagtgatacagccattcttggcatatttcattaccactacattctgtaattggctttttaatataatcgccgtttacatctgaatataaggcataaatccatgtagatatttcattttcaggttggtctttaaactgttgctgacgattgattgtaaaactgatttgccatgcagaatcattgattgtaataataccgccagtaaccgttttgcctgcaagtggatcacgtttacaaatgctttctattgtatcgataatatctttattgtttgttgtcgatgttgctgaaacaaaccaactttttttaggaatattttggcaaaacttatcaggattaccaaattcaggactttgtcgcgctaaatttttccatagtgtccaactaccacctaattcgtcagttggtggtgctggtgtatcattatcaccatacgtagagctttccgtaatactaccgtttgtcacaaagacaagatcatctacagtcagtttaatagattctgcattaccattacggtcaattaatatttctcgggcaattttttgacttgtcgtaacatctactttaatatcttctacttttacatcgtattcaaattgaaccccatgcgattttaaatattcaaccataggtaatactaaagattcatattgattatatttagtgaattttaaagctgaaaagtctgcgagaccaccaatatgatgaacgaatcgcattagataacgacgcatttccatagcagaatgccacggttcaaatgcaaacatcgttttccagtaaatccaaaagtttgaattaaagaagtcatcggaaaatacatctgttattttgacatcatctaaatcttcttcattcgttaagcataaatctaaaatttctttaatcgccgttttagtcaaagtgaagtctccgtctgtgactaaacgttgaccctgtttctcaataacacgacagcgagaatagttagggtcttctttgtttagccaatagaactcatctaatacagacgcgttatcgatttctaatgaagggatagatctgaataagtcccacaaacattcaaagtggttctccatttcacgaccaccgcggacaacatagccttttaaaggcatattttcaccatcaagactaccacctgctttaggtaactcttctaaaatatgaatcttcgaaccttccatttgaccatcccttattaaaaaacaagctgcagcaagtgaagctagaccagatccgattaagtaagcggatttgttttctacattttcaggttttttagggcgcgcaaatgcttcataatttccataactgtaatacatatccaccaagtcctttcgtattagaatacactcagactatacccctttgtgaattgcaaatattagtatttatattggtaaatttgacgaaattagatcatttttatatttttgatttttaaaattttatcactcgaatgtttttggattctgaggtgcgggacttggaataattatgtattttgaaagaagttacttaaactaacgcctagtagagtgataattccgcctataatagcaagggttgttggtagctcgtctaataacagataagataataataaagaaacgataggtgttaaataaagagacattgttgcatcagagacaccaactgacttcacaatataagcaagcaaaacgtatggaattatagtagggaatatagctaaataaagtaccgatactattgatgtaaaagtggcgccgtgtatatcgttgatgatttcaggaataaaaataagcataaatggtgagcttgccattattgtatatagtgtgaaagcgatgaagccgtatttttctatgtattttttctggaaagtaaaatacaaactttcactaaaagatgcaagtaaaataataaaaacacctaatacattaatagttgtgtaatcatctttacttattgaaataatggatattcctataaatgcgacgagtgaacttaaccaattccattttgaaaaatgctcttttaaaaatatataagctaaagcactagaaaaaataggcgttgtagagactagaattccagatatacctgcactaatcaaagtttcaccaaaatttaaagctgtgtgatatatcacaaatccacaaaatcctaaaataaaaataacagggatatctcttagttcaggggtaggcaatttctttataattacgaacggcaagagaattattgttgctaaaattaaacgaaatgccgacaatgattctgcactaaaatcatttaacgcaatctttatcattggaaatgcagatccccacaatatgatagtaaataaatatgatagaaaagtagtgtctcgaagtttattcattaatatcatcactcctttaattatgtgtttctatattaaaaaatatgatttaaaatgagtacaaccaattttgaatggatttacctatccaattttaaaagggagggagaagatggctaaatataaagatattgctagtgacataagagataaaataatcacaggggattggttttatggaatgaaaataccttcacataggcagttggcgatacagtacaacgtaaatagagtaacgattattaaaagtattgagttattagaagctgaaggatttatctatactaaagtaggtagtggaacatatgttaatgactatttgaatgaagcacatattacaaataagtggtctgaaatgatgttatggtcctctcaacaaagaagtcagtatacggtgcaattaattaataaaattgagacagatgattcgtatatacatataagtaaaggtgaattgggtatatcgttaatgccacatattcaattgaaaaaagccatgtctaatacagccagtcatattgaagacttatcttttggttataataatggctatggttatatcaagttaagagatattatcgttgaacgaatgtcaaagcaaggtataaatgtaggtagagaaaatgtaatgatcacttcaggcgctttacatgccattcaacttttatctattgggtttttaggtcaagatgccataataatttcgaatacaccatcatatattcactctacaaatgtttttgagcaattgaattttagacatattgatgttccttataatcaaattaatgaaattgataccatcattgatagatttattaattttaaaaataaagcgatttatatagaacctaggtttaataacccgacaggtcgttctttaacgaatgagcaaaagaaaaatataattacttatagcgaaagacataatattcctatcattgaagatgatatctttagagatattttctttagcgatccaactccttctatcaaaacttatgataaattgggaaaagttatacatataagcagtttttcaaaaacgattgcaccagcaataagaataggttggattgttgcttctgaaaaaataatagagcaattggcagatgtaagaatgcaaattgactatggatccagtattttgtcacaaatggttgtatatgagatgttgaaaaataagtcttatgataaacacttagtaaagttaaggtatgttttaaaagataaacgagactttatgttaaacatcctcaataatttatttaaggatatagcacattgggaggttccaagtggaggttattttgtatggttagtctttaaaatagatatagatattaaatatttattttacgaattgttaagtaaagaaaaaatattaatcaatccgggttacatttatggcagtaaagaaaagagtataaggctatcttttgcctttgaatcaaatgaaaatattaagcatgcgctctataaaatttatacatatgtgaaaaaggtttaattaaaacaataattcgaatcattatgtggcatgttaaacagctaaatataagctatgcacatttaacaagcggatactcctgacgcaattatagtatcattacatattgtttaatcgtttggggtaatgtaattaaaaggtaaaataggcagagtgttatacataaaatgtaaagaaagaggcgatagaatgtctaaaatcaggtcttttacaatattaagtctacttatttacttagctatgatgtgctatacagtagcgacctattcaaaattaccaaccaaagtgcctattcattataatttagcaggggatgctgataactttgctgataaatgggtactgcttttgattaatagtgcatttatagtgatttggcttatatttttcattgcaggtagatactatgaacgatttgccaaatggtcacattataatcatacaccacgtgaaattcgagcgattaaattatttttaagtacgttaaatttagagattatgagctatatgtctatcttcacagtattagaaatttggcaaatacaacaccatcatcaattcaatttactatggtttaatatgatatttatcattatcattggtttgacgcttgtcatattttgtttacttcctacaattcacaaaatgagagattctcaataaaaatataaactgtcatgatgcatttttgaagcggattcctgagattattataaataatatctagtatttataattaaaatgatatattatttattatagttaaatattgtgtatattttgtgaactttttgtaaaaattcgattgcctgtcacatataggagtgttacattttaaatatgtgatcatcgcaaaatataagttgaaataggttgtagattaatcagaatgataaatattttatataaagagagggagtcattatgacactacttactgtaaatccattcgataatgttggattatcagccttagttgcagcagtacctattattttatttttattatgcttaaccgtttttaaaatgaaaggcatttatgcagcattgacaactttggttgttacattgattgtggctttatttgtatttgaattaccagcgcgtgtatcagcaggtgcgattacagaaggcgttgttgccggtattttcccaataggatatatcgttttaatggcagtttggttatataaagtttctattaaaacaggacaattttctattattcaagatagtattgcaagtatttcagtggaccaaagaatccaactattattaattggattttgtttcaacgcatttttagaaggtgcagcaggatttggtgtgccaattgcgatttgtgcagtattattaattcaacttggatttgaaccattaaaagcagcgatgttatgtttaattgctaatggtgcggcgggtgcctttggtgcaattggtttaccagttagtattattgatacgtttaacttaagtggaggcgttacaacattagatgttgcgagatactcagcattaacacttccaattttaaactttattattccatttgttttagtattcattgtagatggtatgaaaggtattaaagaaattttacctgtcattttaacagtgagtggtacatatactggattacaattattattaacaatattccatggtccagaactagcagacattattccatcactagcaacaatggtggtgttagcatttgtttgtcgtaaatttaaaccgaaaaacattttcagattggaagcgtctgaacataaaattcaaaaacgaacgcctaaagaaattgtctttgcttggagtccgttcgtaattttaactgcctttgtattagtatggagtgcaccattcttcaaaaaattattccaacctggaggtgcacttgaaagtttagtaataaaattgccaattccaaatactgtgagtgatttatcgcctaaaggaattgcgttgcgtctcgatttaattggtgcaactgggacagcgattttattaacagtaattattacaattttaattacgaagttaaaatggaaaagtgcaggtgctttattggtcgaagcaattaaagaattatggttaccgatccttacaatttcagctatcctagctattgctaaagttatgacatacggtggtttgactgtagcaattggacaaggtattgctaaagcgggagcaattttcccattattctctccagtattaggttggattggtgtgtttatgactggttcagttgtaaataacaatactttattcgcacctattcaagcgacagtagcacaacaaatttcaacaagcggttcattacttgtggcagctaacactgcaggtggtgtagcagcgaaacttatttcaccacaatcaattgccattgcgactgcagctgttaaaaaagttggtgaagaatctgcattattaaaaatgacgctaaaatacagtattatatttgttgcttttatttgtgtttggacgtttatactaacgttaatattctaaatataaataatgttgtcacttggattcaaatgacattttaaatctaattattcatgaatcgaactagtacgaaatgcattgagcatcttgtctagttcgattttttaatgtctaaaaatgtcgtatatgtaattagagtagaaagtgttgaggcgtttcagaagttgtttagaaaagtaagtaaaataaaaaatgcactgagcaacaaaagatgttgctagtgcatttagatgattcttatcatttcaaataagaatgtgttaatcaacgtatataagttaaaattggtttggataaaatgatatctatcgttgtgtattgtttgtttttatagttcgcgacgacgtccagctaataacgctgcacctaacgctaatgataatccaccaaatacagttgtaccgatgaatggattttcttcaccagtttctggtaatgcttgagctttgttagcatctgcatggtttgctggttgcttcttatcaacaacaagttcttgaccaggtttgatcatgtttttatcagctaatttgttatctgcagcaattttgtcagcagtagtgccgtttgcttttgcaatgtcatttactgtatcaccaggtttaacgacatgtactccgttgccgtcttctttaccaggcttgttgccgtcttctttaccaggcttgttgttgtcttctttaccaggcttgttgttgtcttctttaccaggcttgttgccgtcttctttgccaggtttgttgttgtcttctttaccaggcttgttgccgtcttctttaccaggcttgttgttgtcttctttaccaggcttgttgttgtcttctttgccaggtttgttgccgtcttctttaccaggtttgttgttgtcttcctcttttggtgcttgagcatcgtttagctttttagcttctgctaaaatttctttgctcactgaaggatcgtctttaaggctttggatgaagccgttacgttgctcttcagttaagttaggtaaatgtaaaatttcatagaaagcattttgttgttctttgttgaatttgttgtcagcttttggtgcttgtgcatcatttagctttttagcttctgctaaaaggttagcgctttggcttgggtcatcttttaggctttggatgaaaccattgcgttgttcttcgtttaagttaggtaaatgtaagatttcatagaaagcattttgttgttctttgttgaatttgttatccgctttcggtgcttgagattcatttaactttttagcttctgacaataggttagcactttgacttgggtcatcttttaagctttggatgaaaccattgcgttgttcttcgttcaagttaggcatgttcaagatttcatagaaagcattttgttgttctttgttgaaattgttgtcagctttcggtgcttgagattcgtttaattttttagcttcacctaaaacgttagtgctttggcttggatcgtctttaagactttgaatgaaaccattgcgttgcacttcgtttaagttaggcatgttcaaaatttcatagaaggcgctttgttgatctttgttgaagttattttgttgcgcatcagcttttggagcttgagagtcattaagttttttagcttcacctaaaacgttagcactttggcttggatcatctttaaggctttggataaaaccattgcgttgatcagcatttaagttaggcatatttaagacttgataaaaagcattttgttgagcttcatcgtgttgcgcagcatttgcagcaggtgttacgccaccagatataagtaatgtacctaaagttacagatgcaatacctacacctagtttacgaattgaataaatgtttttctttttcaaattaataccccctgtatgtatttgtaaagtcatcataatataacgaattatgtattgcaatactaaaatctatatttataattaaatttaaaggtaagttttacaacttataaaataaatattttgctgaaagatttattcagagagcaaaaggcttaaaaccgcaaaatcacgctatttcgattaataaaaacagataaaatatagagatattttttataatgaaagcggtttaatacatatgagttaaaaaatatttttaagaataaagtggggctttgaatgtgctgaggtttaatttcggaaatggttttaagtgatatagaaaatagaaagttgttcattatgtgctgaggttttattaaaaaatagaaaacacaagtgcactttagaatacagcacacttgcgtaatagagatattattcaaaaacaagatgtaaatgatctttatctgctaataattgattcacttgagctaataattgttcagcatggtcttgctgcgcgtcatccatatgaattaaaatttttctttcatcttcagttgagcgttcttttattagatagccttgcttttttaaattattgagagctctaacagtttgagggtatttatggtggattgtttcaattaaatctttaagaagaacgatgtttttattttgagaagtgataatagctagaattgtgaattctacaaaacttaatgttagatgttttttgataatattcttgaaatacattgtatacatcatcaagtttagaaattctttactatcttttggtatcatctgtgattcactttgatctgcaaggttaaattgtttaatgatttgatcaaacaatgtaacacgttctgcaattttctctcgttgttcttcagatattgaaatgtaagtattacgctcatcaattttacttcgaactttactaatatatgaatgtttcacaagtacttttatatgctgtactaaatccgattgtttataacataaatctgaaacaatcttcttaaatggaagtgtgttttcttgctgatgaaataaataagtcagtaatataaattcttttatagtcatatcgacttcaggcttgacttttttcttaaaacgaaacatatatgcttcaatgattataaaatctctaattttgtcatggttattatatttcattgttttatctccttgtatatgcactttattttaatataacacaatataataagaaaaataatccataatttacaattaaaaataatatgatatttttattaaaatttgtgtttttgaataaatgacattatcaaacactatatttaaataagaaatagttatcgatatttgaaaaatcgaagaatattgattgatattatagaatatgagtcagtgttatttgtttataaagtattaatatgtaattaagaaagtcgacgcttgttaacaataacgacaactatatgtataaaaaaacctcgcaactgttagttagcttaaacattttgctaacgttgttgtgaggtcattttgttttaataatatcgttataactttttcacggttaataataagtatatgaagaatggggcaccaaaagcagcaataaatacacctgctggcacttctttaggcaagaataaggtacgcccaattaagtctgcaataacaattgatatggcaccaatcattgctgacattagtaactttttagcataacttccgcgaacgattgttttcgcgatatgtggtgcgattaaaccgacaaacccaatgttacctactaaactgattgccatagatacgagtatagtagaagtgattaattggattagtttcatacgttgtacatgtaagcctaagccaatcgctacagggtcatcaagtatagatattttcatttttggtataacaagaaataacaacggcacaacagctaaaataaccatacccaaaatgattgtatctttaaacgtagcaccgtaaagacttccgactagccatgtataagctttggcagcagataattgcttcgttgtaatgagtaatccttggacaagcgcaataaacaacgtttgcatcgaaataccgatgattatgagtgttgtcgggcgtatttgtcctttcgtttgaaacactaatagtatcatcattgcaactgcgccacctaatactgcaaatagtggaagtaaatgtattgttaaatggctgaaaaatgcaataaagacaacagcacttaagctagcaccacctgtgataccgataatatcaggtgaggcaattggattttttaatacattttgcaacattaaaccactcattcctagtgcggcacctgctaaaatcgcaagtgtaatgcgaggtaagcgtaatacttctaaagtgaattgatccatactgtcatttggatttataaagtacatcagtacgcgttgtaatggtataaagcttgaaccaatcatcatacttaccactgaaacgatggctaaaaagattaacgcgaagatgagatggtaattgtcttttttattaatcttttcggtcataagcgttgacgtcctttcttcataatatagattaagacaatagcgccaatgacagcggtaacgacaccgataggcaactctagtggcttaattattatacgagcaacaatgtctgaaatgatcattaggattgctccagctaatgcagtaaaaggaattaaatacttatagtttggtggtaataatcgtttgctaatattcggtacgataagacccacaaagacgattgatccagctacggctaccgaaataccggctaacatactgatgagcataataatcatccatttgattaattttatgttttgaccgaggccggttgcaatgtcgtcacttgtcatcaagatgttgatgtgtgcagccatgctaaatgcaattaaaataagtatcaatacaagcggaataatccatgggatatcccaaatattacgtaatgaaacggagccacttaaccaaaataataggccttgtaagtctgtttcgttcataataagtatgccttgagtaaaggctgtaaatagcatcgcaatcgcagcacctgccaaaatgacacggtgaggtgagaatagtgtttgtctaaacatacctagtgcaacaactaatacagtaacaacaatagcccccaaaaatgcaataactacaatcattttaaaagattgaatttggataaatgtaatactaaaaatgacaaaaaatactgcgcctgcattgacaccgaaaagccctggtgaggctattgggtttcgtgtaagtgcttgcatcaacaaacctgagacagcaagggcagcaccagtcaataacgcaatgattgttctcgacgcccgtgcaccagtgacaacatcatgtaaatcgttttcactatcaaagttgaataacgcctgtatcaccgtacctggtgacacaagcgtatttccaatcattaaacttaagatagctactattgcaagacataaaccagcaataacgatttggtattttggtttaagtagcatcgtaaaactccttaattattttgattgtttttcaatatttaacttttcatataaatcgtcaataagttttaatgaagatttatatccgccagctaagttccaagtgatttcatctaaatcatcagatacttggttgtttttaactgcgtctaaatttttccactctttacttgaagtccattcgctttcagtctttttaactaatgcagcatctttcgcatttggatctgattttactacaaaaatatgatcagcgttcattaatggaatgctttctttagatgtaagttggataatatctttaccattatcaacttgtttttgtaagtctttattacgtttgaatcctaaatcatttaagatttcaccagcatatccaccagcataaattcttgtatgatcagcacggaagttaacaactgaagctttcaatggccatgcatctttatactttgcttttgcatctttttggaatgcagctactttatcatcgtactttttaagtaaatcttcagcttctttttctttccctaaagctttccccattaacttagttgtatctttgaatttgaaaactgtatcagtagaaactgttggtgcgattttagataattgatcgtaaactttttcatttctaacttttgacgcgacaattaagtccggttttaatttagagatttcctctaagttaggtgcaggttcttgacctacaatcttagtatcttttaaatcattttttatgtattcgaatttcggtttttgtgtccatgattctacagcacctacaggtttaacacctaaagatacagcgacgtcagtggcaccttgatatagcgtaacaacacgctttggtttccctttaatttcagttgtacccattgcatgtttaattgaagttgtttccttatctttgttatcagatgattgtttatttgaattcccactacatcctgctaaaacaagtaggaaagcaagcgtaacaacaagcattttaattactttattcattgactaattagcctccttcgtgatgtatgacaatgagaatcattatcacgatttagtatgaattaaattttttcctaagtcaataaaatatttatgatttacatgcaacttataattatttgacatataaatgcataaaaaatataatcctaattacttgatagtgagaatcattatcaattaggtaacacacaatattatagaattttaaatttgaggaggaagcgcttttgattgaaaaaagtcaagcatgtcacgattcattgttagattctgtagggcaaacacctatggttcaacttcatcaactatttccgaaacatgaagtgtttgcaaagttagagtatatgaatcctggaggcagcatgaaagatcgacctgccaagtacatcattgaacatggtattaaacatggtttaatcactgagaatacacatttaattgaaagtacttctggtaatttaggcattgcgttggcaatgatagctaaaatcaagggattaaaactcacgtgtgttgttgatcctaaaatatcaccaacaaatttgaaaattattaaaagttatggtgccaatgtagaaatggttgaagaacctgatgcacatgggggttatttaatgactcgtattgcaaaggtgcaagaactgttagccactattgacgatgcatattggattaatcaatatgcgaatgagttaaattggcaatcccattatcatggtgcaggcacagagattgttgaaacaattaagcaacctatagattattttgtcgcgccagtcagcacgacaggtagcattatgggtatgagtagaaaaataaaagaagtgcatccaaacgcacaaattgttgctgttgatgcgaaagggtcagtcatttttggtgacaaacctattaatagagaattacctggtatcggtgctagtcgtgtacccgaaatattgaatagatcagaaattaatcaagtgatccatgtagatgattatcaatctgctttgggctgtcgaaaactgattgattatgaaggcatatttgccggaggttcaacaggctcgattattgcagcgattgagcagttgataacgtcaattgaagaaggtgcaacaattgtcacgattttaccagatcgaggcgatcgttacttagatttagtttattcagatacatggttagaaaaaatgaaatcaagacaaggagttaaatcagaatgaatagagagatgttgtatttaaatagatcagatattgaacaagcgggaggtaatcattcacaagtttatgtggacgcattaacagaagtattaacagcccatgcgcacaatgattttgtacaaccgcttaagccgtatttaagacaggatcctgaaaatggacacatcgcagatcgaattattgcaatgccaagtcatatcggtggtgaacacgcaatttcaggtattaagtggataggtagtaagcacgacaatccatcgaaacgtaatatggagcgtgcaagtggtgtcattattttgaatgatccagaaacgaattatccaattgcagttatggaagcaagtttaattagtagtatgcgtactgcagcagtttcagtgattgcagctaagcatttggctaaaaaaggatttaaagacttaacaatcattggatgcgggctaatcggagacaagcaattacaaagtatgttagagcaattcgatcatattgaacgcgtgtttgtttacgatcaattctctgaagcatgtgcacgctttgttgatagatggcaacaacagcgtccggaaattaattttattgcgacagaaaatgctaaagaagcagtatcaaatggtgaagtagtcattacatgtaccgtaacggatcaaccatacattgaatatgattggttacaaaagggtgcatttattagcaacatttctatcatggatgtgcataaagaagtctttattaaagctgacaaagtcgtagtagacgactggtcacaatgtaatcgagaaaagaaaactattaatcaattggtgttagaaggtaaatttagcaaagaagcacttcatgctgaactagggcaacttgtgacaggtgacataccaggacgtgaagacgatgatgagatcatattacttaatcccatgggtatggctatcgaagatatttcaagtgcttattttatttatcaacaggcacaacaacaaaatattgggacaacattgaacctatattaagaatgcgaggtgtctgaacattgcagaatcatacagcagtcaatacagcacaaacgataatattaagagatttagttgatgcattattatttgaagatatagccggaattgtatcgaatagtgagattactaaagaaaacggacaaacgcttttgatatacgaacgtgaaacacaacaaataaagatacctgtttattttagtgctttaaatatgtttcgttatgaaagctcacaaccaattacgatagagggaagggcgtctaagcaacctttaacggcagctgaattttggcaaacaattgctaatatgaattgtgatttaagtcatgaatgggaagtggctcgcgttgaagaaggactgactactgctgccacacagcttgctaaacaattatcagaattagatttagcgtcacatccttttgtgatgtcagagcagtttgcaagtttaaaagatcgtccatttcatccattagctaaagaaaaaagaggattaagagaagtggattatcaagtgtatcaagctgaattaaatcaatcatttcctttaatggttgcagcagttaaaaagacacatatgattcatggcgatactgcaaatatcgatgaattagaaaatttgacagcacctataaaagaacaagcgacagacatgttaaatgatcaagggttatcaatagatgactatgtactatttccggtacatccttggcaatatcagcatattctgccgaacgtctttgcgaaagagattagtgaaaagttggttgtactattaccgttaaaatttggagattatctgtcgtcttcaagtatgcgttcattaattgatattggcgcaccgtataaccatgtcaaagtaccatttgcaatgcagtcattaggcgcattaaggctaacgcctacgcgttacatgaaaaacggagaacaagcagaacaattattacgacagcttatagaaaaagatgaagcactagctaagtatgtcatggtttgtgatgaaacagcttggtggtcatatatgggtcaagataatgatattttcaaagatcaattaggtcatctaactgttcagctaagaaaatatcccgaagtgctagccaaaaatgatacgcaacagctagtgtcaatggcagcactcgcggcaaatgatcgcactttatatcaaatgatttgtggaaaagataatatttctaaaaataatgtcatgacgttatttgaagatatcgcacaagtctttttaaaggtaacactatcatttatgcaatacggcgcattaccagagttgcatggtcaaaatatattgttgtcatttgaagatggacgtgtacaaaaatgtgtgttacgtgatcatgatactgtcagaatttataaaccatggctaacagcacatcagctttcattgccgaagtatgtcgttagagaagatacacctaatacgctaattaatgaagatttggaaacattctttgcttattttcaaacattagctgtatcggtaaatctatatgccattattgatgcaattcaagatttatttggtgtaagtgagcatgaacttatgtcgttgttaaaacaaattttaaaaaatgaagtggcaactatttcatgggttacaactgatcagctagctgtcagacacattttatttgataaacagacgtggccatttaaacaaattttattaccattgctatatcaacgtggtagtggtggaggtagtatgccttcaggtttaactaccgtaccaaatccaatggtgacatatgattaatcagtctatatggcgcagtaactttcgcattttatggctcagtcagtttatagcgattgctggactgacagtacttgtgccattattgccaatttatatggcatcactacaaaatctatcagtcgtagaaatacagttgtggagtggtatagcgattgctgctccagctgtaacgacgatgatagcttcgccgatatgggggaagctaggtgataagatcagccgaaaatggatggtgttaagagcgttacttggtttggcggtatgcttatttttaatggcattgtgtacgacaccattacagtttgtacttgtgaggttattgcagggactatttggtggtgttgttgatgcatcaagtgcgtttgcgagtgcagaggcgccagctgaagatcgtggaaaggtattaggaagactgcaaagttcagtcagcgcagggtctcttgtggggccattaattggcggtgttacagcttcgatattaggttttagtgcgttactgatgagtattgccgttattacttttattgtctgtattttcggtgcattaaaattgattgaaacgacacatatgccaaaatcacaaacaccaaatattaataaaggtattcgccgttcatttcaatgtctattatgcacacaacaaacatgtcgatttattatcgttggcgttttagcaaactttgctatgtatggcatgctaactgcattatcaccacttgcttcatcagtgaatcatacagcgatagatgaccgtagtgtgattggatttttacagtccgcattttggacggcttcgatattaagcgcgcctttatggggacgctttaatgataaatcatatgttaaatcagtatatatatttgccacgattgcatgtggttgtagtgcgatactgcaaggtttagcgacgaatatagagtttttaatggctgcaagaatacttcaaggattaacatatagtgcattgattcaaagtgtcatgtttgttgtcgtgaatgcgtgtcatcaacaacttaaaggcacatttgttggaacgacgaacagtatgttagttgttggtcaaattattggcagtcttagtggcgctgccattacaagttatactacaccagctactacgtttatcgttatgggcgtagtatttgcagtaagtagtttatttttaatttgttcaaccatcactaatcaaatcaacgatcacacattaatgaaattatgggagttgaaacaaaaaagtgcaaaataaagaattaatacaacatgcagcgtatgcggctatcgaacgcattttaaatgaatattttagagaagaaaatttatatcaagtaccacctcaaaatcatcaatggtctatacaattatcagagctcgaaactttaacgggtgaatttcgctattggtctgcgatggggcatcatatgtatcatccagaggtatggcttatcgatggaaaaagtaaaaaaataacaacttataaagaagcaattgcgcgtattttgcaacatatggctcaaagtgcagataatcaaacggcagtgcaacaacatatggcgcaaattatgtctgacatcgataatagcattcatcgcacggcgcgttatttgcaaagtaacactatagactacgtagaggatcgttatatcgtttcagaacaatctttatacttaggtcatccatttcatccgactcctaagagtgcaagtgggttttcagaagcagatttagagaaatatgcacccgaatgtcatacatcattccaattgcattatttagctgtgcatcaagatgttctgctcacgcgctatgtagaaggtaaagaagatcaggttgagaaagtgttgtatcaattagcagacatagatatatcagagatacccaaagattttattttattaccaatacatccttatcaaatcaatgtgttgcgacagcatccacagtatatgcaatatagtgaacaaggtttaataaaagaccttggcgtttccggtgatttagtgtacccgacgtcttcggttagaactgtattttcaaaagcattaaacatttatttaaaattaccgatacacgttaaaatcactaattttatacgtacgaatgaccttgaacagattgaacggacaattgatgccgcgcaagttatcgcatcagtcaaagatgaggttgaaacaccccattttaaattgatgtttgaagaaggatatcgtgcattgttaccgaatccattagggcaaacagttgaacctgaaatggatttattaacaaatagtgccatgattgttcgtgaagggataccgaattaccatgctgataaagatattcatgtattggcgtcattatttgaaacgatgcctgattcaccgatctctaagttatcacaagtgattgagcaaagtggtttagcaccagaagcatggcttgaatgttatttgaatcgtacattattgccgatattaaagctgtttagtaacacaggcattagtctagaagcacatgtacaaaatacattaattgaattaaaagatggcatacccgacgtatgctttgtcagagatcttgaaggcatttgtctatctagaacgattgctactgaaaaacagcttgtgccaaatgttgtggcagcatcaagccctgttgtatatgcacatgatgaagcatggcatcgtcttaaatattacgttgtagtaaatcacttaggacatttagtatcaactattggtaaagcgactagaaatgaagttgtgttatggcaacttgtagcgcatcgtcttatgacttggaaaaaagaatacgcgaataacgcagtatttgttgactgtgtagaagatttatatcaaacgccgaccattgcggctaaagcgaatttgatgagtaaattgaatgattgtggtgcaaaccctatttatacacatataccaaatccaatttgtcataacaaggaggtatcgtattgtgaatcaaacaattcttaatcgtgtaaagactagagtgatgcaccaactggtatcatcacttatttatgagaatattgttgtgtataaagcgtcatatcaagacggtgtcggtcattttacaatagaaggacatgattcagagtatcgttttactgctgaaaagacacatagctttgatcgtatacgtatcacatcaccaattgagcgtgtcgtaggagatgaggcagatacaacaacagactatacacaattattgagagaggttgtatttacatttcctaaaaatgatgaaaagctagaacaatttattgtcgagttattacagacagaattaaaagatacgcaaagtatgcagtatcgagaatcaaacccaccagcaacacctgagacatttaacgactatgaattttatgcgatggaagggcatcagtatcatccaagttacaaatcacgtttaggatttacgttgagtgataatttgaaatttggtcctgattttgtaccaaatgttaaactgcagtggttagctatcgacaaagataaagtagaaacgacggtatcaagaaatgttgtagttaacgaaatgttacgtcaacaagttggcgataagacttatgaatattttgtacagcaaattgaagcgtctggcaaacatgtaaatgatgttgagatgatacctgtacacccatggcagtttgaacatgtcatccaagttgatttggctgaagaaaggcttaatggcacagtactatggttaggggaaagtgatgagctatatcaccctcaacaatcgattcgtacgatgtcgccaatagacacgacaaaatattatttaaaggtaccaataagtataacgaacacttcaacgaaacgagtgttggcacctcatacaattgaaaatgcagcgcaaattacggattggttaaagcagatacagcaacaagatacgtatttaaaagatgaattaaagacagcttttctaggggaagtcttaggacagtcttatttaaatacacaactttcgccttataaacaaactcaagtttatggcgcgttaggtgttatatggcgtgaaaatatatatcatatgttaatcgatgaagaggatgcgataccatttaatgcactttatgcaagtgataaggatggtgtaccattcattgaaaattggattaaacaatatggttctgaagcttggacaaagcaatttttagctgtagcgattcgtccaatgattcatatgctttattatcacggtattgcctttgaatcacatgcacaaaatatgatgctcattcatgaaaatggttggcctacacgtattgccttaaaagatttccatgatggtgttcgttttaagcgtgagcatttaagtgaagctgcttcacacctgacattaaagccaatgccagaagcacataaaaaagtgaatagtaattcatttattgaaacagatgacgaacgtttagtacgcgactttttacatgatgcatttttctttattaatatcgccgaaatcatcttatttattgaaaagcaatatggtatcgatgagcagctgcaatggcaatgggttaaagacattatcgaggcgtatcaagaagcatttccagagttgaataactatcaacatttcgatttgtttgaacctacgattcaagttgaaaagttaacgacacgtcgattattaagtgactccgagttaagaattcatcatgttacaaatccattaggtgtaggaggtatcaatgatgcaacaactatctctgaaacatagattaaacaatggtgattcagtttatggcatttttaattctataccggacccattgatgatcgaggttatcgcagcaagcgggtatgactttgttgtgattgatacagaacacgtggcgattaatgatgagacactagcgcatttaattcgtgcagctgaagcagcgcatattataccaattgtacgtgtcactgcagtgatagatagagatatcattaaagtgttagatatgggtgcgagaggtattattgtgccacacgttaaagatcgtgagacagttgagcatattgtgaaattaagtcgttattacccgcaaggattaagaagtttgaatggtggtcgcatggcaagatttggacgtacaccattacttgatgcaatggagatggctaatgagcatattatggtgattgccatgatagaagatgttgaaggggttatggccattgacgatatagctcaagtcgaaggtttagacatgatagtcgaaggtgccgcagatttatcgcagtcacttggcataccatggcaaacgcgtgatgatcaagtaacatcacatgttcaacatatttttgaggttgtgaatgcacatggtaaacatttttgcgcattaccacgtgaagatgaagatattgcaaaatggcaggcacaaggtgtacaaacatttattttaggtgatgatcgcggaaaaatatatcgccatttaagtgcatctctagcgacgtctaaacagaaaggggatgatggctaatgcgtatagttcaacctgttattgaacaattaaaagcacaatctcatccagtttgtcattatatctatgatttagtcggactggaacatcatttgcaacatattacatcgtcattgccgagtaattgtcaaatgtactatgcaatgaaagcaaatagtgaacgaacaatcctagatacaattagtcagtatgttgaaggattcgaagttgcatctcaaggtgaaatagcaaaaggtcttgcttttaaaccagcaaatcatattatttttggtggccctggtaagacagatgaggaactaagatatgcagtaagtgaaggtgttcagcgtattcatgttgaaagtatgcatgaattacaacggctaaatgccatcttagaagatgaagataagacacaacacattttattgcgtgttaatttagcaggaccatttcccaatgcaacgttgcatatggcaggacgcccaacacaatttggtatttctgaagacgaagttgatgatgtcattgaagctgcgctagcaatgccaaagattcatctagatggctttcattttcattctatttctaacaatttagactcgaatttacacgtcgatgtagtgaaactttattttaaaaaagcaaaatcatggtctgaaaaacatcgatttccactcaaacatataaatcttggtggtggcataggcgttaactatgcagatttaactagccaatttgagtgggataattttgtagaaaattttaaaacacttatcgttgagcaagaaatggaagatgtgacattgaactttgaatgtgggcgctttattgtggcacatattggttactatgtgacagaagtgctagatattaagaaagtacatggtgcttggtatgccattttaagaggaggtacgcaacaatttagactgccggtatcttggcagcataaccatccttttgaaatttatcgttataaggacaatccatattcatttgaaaaagtttcaatttcgagacaggacacaacgttagtcggtcaattatgtacaccgaaagatgtctttgctagagaagtgcagatagacgcaatcagtacaggcgacgttattgttttcaaatatgcaggtgcatacggatggtctatttcacatcacgatttcttaagccatccacatcctgaatttatttatttaacgcaaacaaaggaggatgaataactattgaatcatattcatgaacatttaaaattggtaccagtagataagattgatcttcacgaaacattcgaacctttaagattggaaaagacgaaaagtagtattgaagcagatgattttatacgtcatcctattttagtgacagcgatgcaacatggtagatatatggttatagatggtgtgcatcggtatacaagtttgaaagcgttaggatgtaagaaagttccagtgcaagaaatccatgaaacacaatattcaattagtacatggcaacataaagttccatttggtgtgtggtgggaaacgttacaacaagaacatcgcttgccatggactactgagacaagacaagaagcgccatttattacaatgtgtcatggtgatacagaacaatatttgtatacaaaagatttaggcgaagcacattttcaagtatgggaaaaggttgtcgcaagttatagtggttgttgttctgtagagagaattgcacaaggtacatatccttgtctttctcaacaagatgtactcatgaagtatcagccattgagttataaggaaattgaagcggttgttcataaaggggaaactgtgccagcaggtgtgacacgctttaatatttcaggacgatgtcttaatcttcaagtaccactggcattacttaaacaagatgatgatgttgaacaactgcgcaattggaagcagtttttagcagataagtttgccaatatgagatgctatactgaaaaagtatacttggtggagcaatagttttactgtgatgttgagggaaatatgatgatttagcgtattgatagcgaaaatataataaaacaatatagtgtggagaacttttgatattttataaatattgaagttctccatttttgtattttgcatataaaaattaaataaaataaggtatattaaggtaaagtataaatattaaataaatggggaatgagtatgagctcaattataggaaaaatagcaatttggataggcatcgtagctcaaatatattttagtgtcgtttttgttaggatgatatctattaatattgctggaggatctgattacgaaacaatttttttattaggattaatattggctcttttcactgttttaccaaccatctttactgcgatttatatggaaagttactctgtaatcggaggtgcactttttattgtttatgctattattgcactgtgtttatataatttcctttcgtcaattttatggctgattggtggtattttgctgatttggaataaatactcaaaagatgaatcgacagacgaaaatgaaaaagttgatattgaaagtacagagaatcaatttgaatctaaagataaaatcactaaagaataaagagaatatttaaggcggagtataaatattaaataaatggggaatagacatggaaaaaaatgtagaaaaatcattcataaagataggtttatattttcaaatagcttatatagtactcatggctataactttatgtgggtttgtaatttgctatggactaattttcggccttttctatttattatcaggtagcaaagttgattatttaatagtaacaatagttatatcggcaataatttctatatttgtaattatactttcaatcgtacctgtcatcgtattggcatctgacttatttaaagaaaggatttcaaaaggtgtcatattaattgtattggctattatcgctttagtattatgcaactttgtatctgcaatactctggtttgtttcagccatatctattttaggtagaaaaaaattagtagctgcagcagatactaccactattcaaaaaagtaaagggaacgcaaatcaagcatcacataaagacacgggtaaaaaggaacttgatagtcaagacatgatggaacatcctgaggttaaaaatcccacgactaaaaaccttgaagtatttaacgaagaaatacataaagatgaagctacaactaaagttgacagtgataacacggaaccgccgattgaatcaaaagaccatgactcgaaaaaagattgatgacaaactaatcgagagacttaaaaaataatattcaacataagcacttttaaaatgacatttaaacgcattgccaatcactaatggtagtgcgtttaactataccttaaatatctgaatattttgttaaatggagttatctttgttgtactattcaaatgaagaggagtaaaatgtaattaaaggaaagtaatttgaggagtgatctttatgacaaacaacaaagtagcgttagtaactggcggagcacaagggattggttttaaaattgcagaacgtttagtggaagatggtttcaaagtagcagttgttgatttcaatgaagaaggggcaaaagcagccgcacttaaattatcaagtgatggtacaaaagctattgctatcaaagcagatgtatcaaatcgtgatgatgtatttaatgcagtaagacaaactgcagctcaatttggcgatttccatgtcatggttaacaatgccggccttggaccaacaacaccaatcgatacaattactgaagaacagtttaaaacagtatatggcgtgaacgttgcaggtgtgctatggggtattcaagccgcacatgaacaatttaaaaaattcaatcatggtggtaaaattatcaatgcaacatctcaagcaggcgttgagggtaacccaggcttgtctttatattgcagtacaaaattcgcagtgcgaggtttaacacaagtagccgcacaagatttagcgtctgaaggtattactgtgaatgcattcgcacctggtatcgttcaaacaccaatgatggaaagtatcgcagtggcaacagccgaagaagcaggtaaacctgaagcatggggctgggaacaatttacaagtcagattgctttgggcagagtttctcaaccagaagatgtttcaaatgtagtgagcttcttagctggtaaagactctgattacattactggacaaacaattattgtagatggtggtatgagattccgttaataatcatccactaatgataaataaatccttattgttaagtttaatcacttagcagtaaggattttttagtgcacttagaagggagtgtattggtagaaaattaataagcgaagttcttaagtgagttatgatgtcacagtctaatgcatcagttgaaagcattattagtattaacacacccaagatattataaaacatcacaaaaacaccactatctaatttatctcaataaaaattcacaaagttatctcattttatttttataaataaaaaatatcgataaaaagcttacaatactttatgtttttatgatatatttttaatgtataaatgaggtggaagatttggaaagagttttgataactggtggggctggttttattgggtcgcatttagtagatgatttacaacaagattatgatgtttatgttctagataactatagaacaggtaaacgagaaaatattaaaagtttggctgacgatcatgtgtttgaattagatattcgtgaatatgatgcagttgaacaaatcatgaagacatatcaatttgattatgttattcatttagcagcattagttagtgttgctgagtcggttgagaaacctatcttatctcaagaaataaacgtcgtagcaacattaagattgttagaaatcattaaaaaatataataatcatataaaacgttttatctttgcttcgtcagcagctgtttatggtgatcttcctgatttgcctaaaagtgatcaatcattaatcttaccattatcaccatatgcaatagataaatattacggcgaacggacgacattaaattattgttcgttatataacataccaacagcggttgttaaattttttaatgtatttgggccaagacaggatcctaagtcacaatattcaggtgtgatttcaaagatgttcgattcatttgagcataacaagccatttacattttttggtgacggactgcaaactagagattttgtatatgtatatgatgttgttcaatctgtacgcttaattatggaacacaaagatgcaattggacacggttataacattggtacaggcacttttactaatttattagaggtttatcgtattattggtgaattatatggaaaatcagtcgagcatgaatttaaagaagcacgaaaaggagatattaagcattcttatgcagatatttctaacttaaaggcattaggatttgttcctaaatatacagtagaaacaggtttaaaggattactttaattttgaggtagataatattgaagaagttacagctaaagaagtggaaatgtcgtgaaaatgacattgaagctgtccataataataagggttatgcctatcaaagaaaattagacaaactagaagaagtgagaaaaagctattacccaattaaacgtgcgattgacttaattttaagcattgttttattatttttaactttaccgattatggttatattcgccattgctatcgtcatagattcgccaggaaaccctatttatagtcaggttagagttgggaagatgggtaaattaattaaaatatacaaattacgttcgatgtgtaaaaacgcagagaaaaatggtgcgcaatgggctgataaagatgatgatcgtataacaaatgtcgggaagtttattcgtaaaacacgcattgatgaattaccacaactaattaatgttgttaaaggggaaatgagttttattggaccacgcccggaacgtccggaatttgtagaattatttagttcagaagtgataggtttcgagcaaagatgtcttgttacaccagggttaacaggacttgcgcaaattcaaggtggatatgacttaacaccgcaacaaaaactgaaatatgacatgaaatatatacataaaggtagtttaatgatggaactatatatatcaattagaacattgatggttgttattacaggggaaggctcaaggtagtcttaatttacttaataagttcaaataaaagttatattttaaagattgtgaccaattgttacagtataacgaggaatcccttgagacagtatcaaatggcattaagaaatatgtgccatcattgatttgcatggctataaatactattcatctgatgagatagccatgttaagaaattgaaagtatagcattaaaggggtttgtaacagttgaaaattatatattgtattactaaagcagacaatggtggtgcacaaacacatctcattcaactcgccaaccatttttgcgtacaccatgatgtttatgtcattgtaggcaatcatggaccaatgattgaacaactagatgcaagagttaatgtaattattatcgaacatttagtaggtccaattgactttaaacaagatattttagctgtcaaagtgttagcacagttattctcgaaaattaagcctgatgttatccatttacattcttccaaagctggaacggtcggacgaattgcgaagttcatttcgaaatcgaaagacacacgtgtagtttttactgcgcatggatgggcttttacagagggtgttaaaccagctaaaaaatttctatatctagttatcgaaaaattaatgtcacgtattacagatagcattatttgtgtttcagatttcgataaacagttagcgttaaaatatcgatttaatcgattgaaattaaccacaatacataatggtattgcagatgttcccgctgttaagcaaacgctaaaaagccaatcacataacaatattggcgaagtagttggaatgttgcctaataaacaagatttacagattaatgccccgacaaagcatcaatttgttatgattgcaagatttgcttatccaaaattgccacaaaatctaatcgcggcaatagagatattgaaattacataacagtaatcatgcgcattttacatttataggcgatggacctacattaaatgattgtcagcaacaagttgcacaagctgggttagaaaatgatgtcacatttttgggcaatgtcattaatgcgagtcatttattatcacaatacgatacgtttattttaataagtaagcatgaaggtttgccaattagcattatagaagctatggctacaggtttgcctgttatagccagtcatgttggcggtatttcagaattagtagctgataatggtatatgtatgatgaacaatcaaccagaaactattgccaaagtcttggaaaaatatttaatagacagtgattacatcaaaatgagtaatcaatctagaaaacgttatttagaatgttttactgaggagaaaatgattaaagaagtggaagacgtttataatggaaaatcaacacaatagtaaattactaacattgttacttatcggtttagcggtttttattcagcaatcttcggttattgccggtgtgaatgtttctatagctgactttatcacattactaatattagtttatttactgtttttcgctaaccatttattaaaggcaaatcattttttacagtttttcattattttgtatacatatcgtatgattattacgctttgtttgctattttttgatgatttgatatttattacggttaaggaagttcttgcatctacagttaaatatgcatttgtagtcatttatttctatttagggatgatcatctttaagttaggtaatagcaaaaaagtgatcgttacctcttatattataagcagtgtgactataggtctattttgtattatagctggtttgaacaagtcccctttactaatgaaattgttatattttgatgaaatacgttcaaaaggattaatgaatgaccctaactatttcgcgatgacacagattattacattggtacttgcttacaagtatattcataattacatattcaaggtccttgcatgtggtattttactatggtctttaactacaacggggtctaagactgcgtttatcatattaatcgtcttagccatttatttctttattaaaaagttatttagcagaaatgcggtaagtgttgtgagtatgttagtgattatgctgatattactttgttttactttttataatatcaactactatttattccaattaagcgaccttgatgccttaccgtcattagatcgaatggcgtctatttttgaagaggggtttgcatcattaaatgatagtggatctgagcgaagtgttgtatggataaatgccatttcagtaattaaatatacattaggttttggtgttggcttagtggattatgtacatattggctcgcaaattaatggtattttacttgttgcccataatacatatttgcaaatttttgcggaatggggcattttattcggtgcgttatttatcatatttatgctttatttactgtttgaattatttagatttaacatttctgggaaaaatgtaacagcaattgttgtaatgttgacgatgctgatttactttttaacagtatcatttaataactcaagatatgtcgcttttattttaggaattatcgtctttattgttcaatatgaaaagatggaaagggatcgtaatgaagagtgattcactaaaagaaaatattatttatcaagggctataccaattgattagaacgatgacaccactgattacaatacccattatttcacgtgcatttggtcccagtggtgtgggtattgtttcattttctttcaatatcgtgcaatactttttgatgattgcaagtgttggcgttcagttatattttaatagagttatcgcgaagtccgttaacgacaaacggcaattgtcacagcagttttgggatatctttgtcagtaaattatttttagcgttaacagtttttgcgatgtatatggtcgtaattactatatttattgatgattactatcttattttcctactacaaggaatctatattataggtgcagcactcgatatttcatggttttatgctggaactgaaaagtttaaaattcctagcctcagtaatattgttgcgtctggtattgtattaagtgtagttgttatatttgtcaaagatcaatcagatttatcattgtatgtatttactattgctattgtgacggtattaaaccaattacctttgtttatctatttaaaacgatacattagctttgtttcggttaattggatacacgtctggcaattgtttcgttcgtcattagcatacttattaccaaatggacagctcaacttatatactagtatttcttgcgttgttcttggtttagtaggcacataccaacaagttggtatcttttctaacgcatttaatattttaacggtcgcaatcataatgattaatacatttgatcttgtaatgattccgcgtattaccaaaatgtctatccagcaatcacatagtttaactaaaacgttagctaataatatgaatattcaattgatattaacaatacctatggtctttggtttaattgcaattatgccatcattttatttatggttctttggtgaggaattcgcatcaactgtcccattgatgaccattttagcgatacttgtattaatcattcctttaaatatgttgataagcaggcaatatttattaatagtgaataaaataaggttatataatgcgtcaattactattggtgcggtaatgaatttagtattatgtcttgttttgatatatttttatggaatttacggtgcggctattgcacgtttaattacagagtttatcttacttatttggcgatttgttgatattactaaaatcaatgtgaagttgaatattgtaagtacgattcaatgtgtcattgctgccgttatgatgtttattgtgcttggtgtggtcaatcattatttgccccctacaatgtacgctacgctgctattaattgcgattggtatagtagtttatcttttattaatgatgactatgaaaaatcaatacgtatggcaaatattgaggcttcttcgacataaaacaatttaagtatcggtaacgctatactttagaaatttaagattaagaagaaaaggcaatttcttattgaaaaatggaagttgtcttttttaattctctttaaaagcgggaaacaaaagcagttaaatgcctttttgcattcaatattaaatattatatcaatttcgaatatttaaattttatataattggatataacaaataaataataattattgcaaaacacacccgaaattaattattataaaagtatattcataaaaggaggaatatacttatggcatttaaattaccaaatttaccatatgcatatgatgcattggaaccatatatagatcaaagaacaatggagtttcatcacgacaaacatcacaatacgtacgtgacgaaattaaacgcaacagttgaaggaacagagttagagcatcaatcattagcggatatgattgctaacttagacaaggtaccggaagcgatgaggatgtcagtccgtaataatggcggtggtcattttaaccattcattattctgggaaatactatcacctaattctgaagaaaaaggtggcgtaatagatgacatcaaagcgcagtggggcactttagatgaatttaaaaatgaatttgcaaataaagcaacaacattatttggatcaggttggacttggttagttgttaatgatggcaaattagaaattgtgacaacgccaaaccaagataatccattaacagaaggcaaaacaccaatcttactatttgatgtttgggagcatgcctactatctgaaatatcaaaataaacgtccagactatatgactgcattttggaatattgttaactggaaaaaagttgatgaattataccaagcagcaaaataatataacttaatataattgaggtggagcatctacaaggtgttccacttttttgtacttaatatctttacttatttgtttttgtgtaatgggatagcacgtaaaagtggcaaaataataagataaatttcaactcgaaataccttattattgttgactataatgatgacctaaatgttatacacatcagacaatactattaattaatcaacatattgacattaaataaattgacaaaataagtaattattgtgaatctaaagtgaaatttttataaaaaaatgtaatgattcaaaaattttgttgcatttcttttgtaatcgtatgataatataaatgtaatcaaattgtaatataaggggacaagacaatgaaaaaattagcaacagtaggttctttaattgtaacaagcactttagtattctcaagtatgccttttcaaaatgcgcatgccgacacaacttcaatgaatgtgtcgaataaacaaagccaaaatgtacaaaatcatcgtccttatggcggagtagtaccacaaggaatgacgcaagcacaatatactgaattagagaaagctttatcccaattaagcgctggcagtaatatgcaagactataatatgaaattgtatgatgcgacgcaaaatattgctgataaatacaatgtgataattacaactaatgtaggggtatttaaaccacatgctgttagagatatgaatggccatgcgttacctttaacaaaagatggcaatttttatcaaacgaatgtagatgcaaatggtattaatcatggtggtagtgaaatggtgcaaaataaaacaggtcatatgagtcaacaaggccatatgaatcagaacacacacatgaaccaacagccacacatgcaacaaggtcatatgcaatcatcaaaccatcaaatgatgagtccaaaagcaaatatgcattcatcaaatcatcaaatgaaccaaagtaacaaaaaagttttaccagctgctggtgaaagtatgacatcaagtattcttactgcaagtattgccgcactactattagtatctgggttattcttagcatttagacgacgttcaacaaataaataaacataatacgattaataatagaaaaatcgtgtgattatctgagcgagcctaggacataaatcaatgtcctaggctcgctaatgttatattggcagtagttgactgaatgaaattgcgcttgtaacaagcttttccatttcttaccaactccctaaatagtcatcaaaaaatttcttatattttaataattttaataatccgattgtcttatacgtgtcagtgttaattcagagatttcctgtggaatataccacttattaatcataattggataaggtgtttgtgcgtacaatgtttcaataatcagccaacaatgtgtatcaccatcaaacacgtgactatgatttttgaagtggggcgctttggtaatagacatttttaaatctgattgatatgcattgctataaatcgtttgctcaacgaatgtcttcatgtcgtcttcgttttgtgtattcactttaaatgtgtcaatgacatttaacggtataaaggtaaagcaaaatgcatcagcttgcttagaatgattgtcctttttttgataatagcgttccattgcaatgacggcagaaggatggtttgcaaacaaatgatttgtatattcactttctaaatcaacacgataattaattgatgacatagatacgcgagctagcaatatttgatcaagtggatgcttaaattgatccatacttgaagcgtgttgggcatttgtttgtggaataacaaagtgtcccttccctcttgtactctctacgatgccatcttcggctaacaattttatagcttggcgcaaagtcatacgactgacatcaaagcgcgcacaaagttccttttcagtaggtaatgcatggccactcggatattttcctatttgaatttctttatataacgtattataaatcgttaaaaattttggttgtgtttgcgtcacgtagacaacctccataaagttacttaatcactctcatcatacaataatttttactcgaattggaaaaattataaaaattaaatatagataggctttgaaaattagttttatacaaggttagtagctgtaactgtaaaatgttcttaatattgtcaaaatgtaatgcttgaaagcgtttttaaaaaatattattatatacatggttagacaaatagacaaatcactatacaaatattgggaggaatattttatgaaatcaacaccacacattaaaccaatgaatgacgtcgaaattgcagaaacggttctattgccaggagatccgttaagagctaagttcattgcagaaacttatttggatgatgtggaacagttcaatacagtgcgaaacatgtttggttttaccggaacatataaaggtaaaaaagtttctgtcatgggttcaggtatgggtatgccatctattggcatttactcttatgaattaattcatacatttggttgtaaaaaattaattcgcgttggttcttgtggcgcgatgcaagaaaacattgatttatatgatgtgattattgcacaaggtgcctctactgattcaaattacgttcaacaatatcaattaccaggtcattttgcgccaattgcttcttatcaattattagaaaaagcagttggaacagcacgtgacaaaggtgtacgtcatcatgtaggtaatgtgttatcaagtgatattttctataacgcggatacaacagcgagtgaacgttggatgcgtatgggtattttaggtgtagaaatggaatcagctgcattatacatgaatgcaatttacgctggtgtcgaagcattaggtgtgttcacagtgagcgatcatttaattcatgaaacgtcaacaacacctgaggaaagggaacgtgcatttacagatatgattgaaattgcactgtcattggtttagataattatgaatgttgaatattctaaaataaagaaagcagtacctattttattattcttatttgtattcagtttggttatagacaactcatttaaattgatttctgtagccattgctgatgacttaaacatttctgtaacgacagtaagttggcaagcgacattagccggtttagtaattggtattggcgctgtagtatacgcttcattatctgatgccattagtatacgcacactatttatttatggcgtgatattaatcattatcggatcaattattggttacattttccaacatcaattcgcattacttttagttggacgtattattcaaactgccggtttagccgctgcagagacattatatgtgatatatgttgcaaagtatctttctaaagaggaccagaagacttaccttggcttaagtacgagcagttattccttgtcattagttatcggtacattatcaggtggatttatttctacgtatttacactggacaaatatgtttttaattgcattaatcgtagtatttacgttgccattcctatttaaattattaccaaaagaaaataatacgaataaagctcatttagattttgttggcttaattctagtggcaactattgctacaacagtcatgctgtttattacgaactttaattggttatatatgattggtgccttaattgcgattatcgtttttgcgctatatattaaaaatgcgcaacgtccattagtaaataaatcatttttccaaaataaacgttatgcttcatttttatttatagtatttgtaatgtatgctatccaattgggttatatttttacgttcccattcataatggagcaaatttatcatctgcaactagacacaacatcactgttattagtaccgggttatatagtagcagtcatcgttggtgcactaagtggtaaaatcggcgaatatctgaattcaaaacaagcgattatcacagcaattattttaatcgcactgagcttgattttacctgcatttgcagtaggtaatcacatttcaatcttcgtcatttctatgatattctttgcaggtagctttgctttaatgtatgcacctttacttaacgaagccattaaaacaatagatcttaatatgacaggtgtggctattggtttttataatttaattattaatgtggcggtatctgtaggtattgcgattgctgcggctctaatcgattttaaagcattaaatttcccaggcaatgatgcattaagttcacatttcggtattattttaattattttaggtttaatgagtattgtcggattagttttattcgtcagcttaaatcgttggacacaatctgaaaaataaatagatataaattcgcgagatatattcgtatttatagtaaaattaaataaagagattatataacacgaggagtagtaagtatgaaatttgagaaatatatagatcacactttattgaagcctgagtcaacacgtacgcaaatcgatcaaatcatcgatgaagcgaaagcatacaattttaaatctgtatgtgtgaatccaacacatgttaaatatgcagcagagcgactagctgattcagaggtgctcgtttgtacggtaataggattcccattaggtgcgtcgacaactgcaacgaaagcatttgaaacagaagatgcaattcaaaatggtgcagatgaaattgacatggtcatcaacatcggcgcattaaaagatggacgttttgatgatgtacaacaagacattgaagcagtggttaaagctgcgaaaggtcacacagtaaaagtgattattgagacggtattgttggaccatgacgaaattgtaaaagcgagtgaattaacaaaagcggctggtgcggacttcgttaaaacttcaacaggttttgcaggtggcggtgcgactgcagaagacgttaaattaatgaaagatacagtaggtcctgatgtagaagtaaaagcatcaggtggcgtacgtaatttagaagatttcaataaaatggttgaagcaggtgcgacacgtattggtgcgagcgcaggcgttcaaattatgcaaggtttagaagcagattcagattactaatatatataaaatttgggagtgatagctatgacaagaccatttaatcgtgtacatttaatcgtaatggattcagtaggtattggtgaagcgccagacgcagctgattttaaagatgaaggttcacatactttaagacatactttagaaggcttcgatcaaactttaccaaaccttgaaaagttaggtctagggaacatcgataaattaccagtagtaaatgcagttgaacaaccagaagcatactatactaaattgagtgaagcttcagttggtaaagatacaatgactggtcactgggaaattatgggattaaatattatgcagccttttaaagtataccctaacggattccctgaagagttaattcaacaaattgaagaaatgacaggtcgtaaagttgttgctaacaaaccggcatcgggtacgcaaattatcgatgagtggggcgagcaccaaatgaaaactggtgacttaattgtttatacaagtgcagacccagtattgcaaattgctgcacatgaagacattatcccattagaagagttatatgatatttgtgaaaaggttcgtgagttgacaaaagaccctaaatatttaattggtcgtattatcgcacgtccatatgttggtgaaccaggaaactttacacgtacatctaatcgacatgactatgcgttaaaaccttttggtaaaactgtcttagatcatttgaaagacggtggttatgatgttattgccatcggtaaaattaatgacatttatgatggtgaaggtgtaacagaagcggttcgtacgaagagtaacatggacggtatggatcaattgatgaaaattgttaagaaagatttcacaggtattagcttcttaaacttagtagactttgatgcattatacggtcatcgtcgtgataaaccaggttatgcacaagcaattaaagatttcgatgatcgcttgccagaactgtttagcaacttaaaagaagacgatttagtaattattacagcagaccatggtaatgacccgacagcgccaggtacggaccatacgagagaatatatcccagtaattatgtacagtccgaaatttaaaggtggtcatgcactagaaagtgatactacattcagttctatcggtgcaactatagcagataatttcaacgtaacattaccagagttcggtaaaagttatttaaaggaattaaaatagaataaatttagatattataaaaatagcagtgaagttaactataataatagttttcttcactgctgtttttattataatagagaaacgtaagacggtaggaactcttatttaggagtatcctgatttaatgttaaacaatacgttttcggattgaaccggaaattaaatcgacaattgcgaccattagtactaaaccgattaatataatacctacacggtcccaagaacgtgtttgaatggcaaatatgagtggtgtcccgataccaccagccccaattagccccagtatagaagctgaacgtaagtttagttcaaagcgataaagtatgagtgatagaaaggcaggcataatttgtggtatgactgcaaatacgagtgttttaatcttattcgcaccactggcctttaatgattctacagcactgaaatctagaccttcaatatcttcagctaaaagtttcccaagcatacctacggaatggatacctaaagctaatacacctgaaaatgaacctgggccaacagctttgataaatataagtgccattacaatttctgggaagacacgtataacacttaaaataaatttgcttacacctgaaactgggcgtagctttaccatattatttgcacctagaaatgctaatggaatacagataattgcggcgatgaaagtacctacaacggctatcgcaaaggtttcaagtaaaccacgtaataagtcttcgccatctggtatatagatatagctgatgtcaggatggaataatccgctgaatatggattttaagatttctaatgatttacttttaagttctaaacttggtacacctgcaaatgcccagatgataatagctaagacgacaattgcaataagccatcttttaatcaattttcgtttgtgtgcttttgtgtgaacattatattttgctatttcctgtgtcatgcgagatgtgccctcactttcgtactgatgtaatcaatgacgacgacgataactaaagtaaataaaataatcgttgctgtttttggatattgaaataaaccaagtgtttgatcataaaacaatccaataccgccagcgccgactaatccaagcacagctgaagctcgtatatttacttcaaatgcatataatacgtatgacataaatgacgatatggcttgtggtacaacaccgaaaacaatccattttattttattagcgccaacagccgtcattgcttccattggacctggatctatcgtttccaatgattcatataataattttccaataatacagatagttaaaataaacaatgctaatatccctggaatttgaccgattccaaatacagccacaaagattgctgctaataacaaatctggaatagtacgaactatatttaaaataaagcgcgagggtattgaaatccacttttgatgaacgatattgctagcacataataacgcaattggtattgaaacgatgctacctaatactgtacttacgatagccattcgaatggtatctaacattggcgttgtaatttgttgtaaatactcgaaatcaggtggaatcatttgtttgaatagatcacctatttgaggtattcctatcattaaatctccaaaattaaaccccgtataaatgaagctccaaatgataagcacaatgattaacatgaaggtaaaactcgtttttaaagaaacctttttctttaaaagggagtcatactttgtaggtatttctaaaggcatgttagttcactcctagcttttcatcttctttaattgtacgtccatatatttcactaaatacgtcatctgttgcttcagatgcaggaccatcatagacaacttcaccatcacgtaaaccaatgatgcgtgtgccatattcttttgccaagtcaacaaaatgtaaattaattaaaattgtgatgcctaattcttggttgatttttcttaaatcatccataacctgtttcgtagttaatgggtctaatgaagcaactggttcatctgcaagaataatttcagattcttggcatagcgcacgtgcaatagatatacgttgttgttggccacctgataattcatcagagcgttgattatatttatctaagatattgacgcgttctagtgcatccattgccttaattttgtcttcttttgggaataaacctaataccattttccaagtagggtgataacctacacgtccacttagtacatttcgtaatacacttgaccgtttaactaaattaaaatgttggaaaatcatacctatatttcggcgcatttctaataatgctttaccatgggctttagtgattgatttaccttggatgaaaatttcacctgacgtgatatcatgcaaacgatttacagatcttaataacgtggatttcccagcaccagatagtccgacaataactgcaaattcacctttttcaatatttaagttaatatttttcaagcctacatgaccgttaggatagactttactgacgtttttaaattcgatttgactcatgtttgacacctttctttaataaagaaaagccaaggtaaactgaaatatcatagacattgggtttctgtgtacaaatggtttcaaatgtacagcgacacctttctatatctgtttcagtttagcgcctagcttttcaatattaatctagaatatatctattgaacgaaagcttttaataccaaattcgctaatgattcatttgttaaataatgattatttcatatctttaactaatttttcgtactctcttacaatgtcgaaatttgaatctttcgtttctgtgtatccttcatgtgaataaacttcgctaataattttgtgaccttcttttgatttagcaatgtctataaaagcttttttcaatttttcttgaaaatctttatccatatctggtcttacagaaattgtgtcattcggaatagcttgtgttaattttaaaattcgtgtgtctttaaatacatttggttggtcttttttcacagtattacgtgcatcgttaaatacagccgcagcatctacatctccatttaataatgagataactgcttggtcatgacctttaacattcacaattttcatatctttagttgcattaatacctgcttcgttttttaacatcgcaagtgggaatgtatatccagcagttgatgttacatcttgtaaggcaattttcttaccttttaaatctttcaagcttttaatttttgagtcttttttaacaagaatttctgatttataactatctacaagttctttacttgctgaaccatcttcttttacaccgaaacgttgtgcttgtaataataaatcagctgctttttgatcatgtgctaatgtgtatgccgttggtggtaagaaaccaacatcaacttttttagacttcatagcttcaacaattgtattgtagttagttgatacagacactttaactggaatccctaattctttagatagtaatttttctaatggttttgctttagcttctaatgttccagcattttgcgaaggtacaaattgaacggttaattctttaggtttgtatcctcctgatttagaatccgaatcattactagcgttcttttgattatctaaagaacttgagtttccacatgctgctgcaaaaacaatgactgctaacattaatacaaataaacacttaaaatttttcatttgataactgtccccttcacattcttaatcgtgtaatatgtatgcaatgaaattacacttatagcgtaccacatttaaatgtgaaaaagtattttataaaaattaattttaataactttctttaagagtttgataagattttgtaaatttttcgttaaattgctcatatgcaacgaatttttatcctataattcaagaacaaatttattttaaaaggagcctcacaaaatgaaaaaaatatataagtcattaactgtctctgcaattgttgcaacggtatcattaagtgctttaccgcaatctttagctataacgcatgaatcgcaacctacaaagcaacagcgaacggtattattcgatcgttctcatggtcaaacagctggtgctgcagattgggttagtgatggtgcattttcagattatgcggattcaatacaaaaacaaggttatgacgttaaagctattgatggtcattcgaacataacagaagcaagtttgaaaagttccaaaatatttgtaattcctgaggctaacattcctttcaaagaatcagaacaggcagcaattgttaaatatgtgaaacaaggtggcaatgttgtctttatttcagatcattacaatgctgaccgaaatttaaatcgtattgattcatcggaggcaatgaatggttatcgacgtggagcatatgaagatatgtcgaaaggtatgaatgcagaagaaaaaagttctactgcaatgcaaggtgtgaaaagttcagattggttatctacaaactttggcgtacgttttcgatataatgcactaggtgatttaaatacgagcaatattgtttcttcaaaagaaagtttcggtattactgaaggtgtgaaatctgtctctatgcatgccggatcgacattagcaattactaatccagagaaagcaaaaggtattgtgtatacaccagaacaattgccagcgaaaagtaaatggtcacatgctgtagatcaaggtatttataatgggggcggtaaagcagaaggcccctatgtagcaatttctaaagttggaaaaggtaaagcagcatttatcggtgattcatcacttgtggaagatagttcgcccaaatatgtaagagaagataatggagaaaagaagaaaacatatgatggttttaaagaacaagacaacggtaagctattaaataatataacggcttggatgtctaaagataatgatgggaaatcacttaaggcgagtggcctaacattagatacaaagactaagttgcttgattttgaacgaccagagcgttcaactgagcctgaaaaagagccatggtcacaaccgccgagtggttataaatggtatgatccaacaacatttaaagcaggtagttatggcagcgaaaaaggcgcagatcctcagccaaacacaccagatgatcatacaccaccaaatcagaacgaaaaagtaacatttgatatcccgcaaaatgtttctgtaaatgagccatttgaaatgacaatacatttaaaaggatttgaagcaaatcaaacacttgaaaatcttagagttggtatttacaaagaaggcggacgtcaaatcggacaattttcaagtaaagataacgattataacccaccaggttacagtactttgccaacagttaaagcagatgaaaacggaaatgtcacaattaaggtcaatgctaaagtacttgaaagtatggaaggttcaaagattcgtttaaaactcggtgacaaaaccttgattacaacagacttcaaataaatatataatagaaataagaaagatgtttgtgattgaaggagtgagtgaggatgtcaaacatagcattttatgtcgtgagtgacgtacatggttatattttcccaacagattttacgagtagaaatcaatatcaacctatgggattgttactagcgaatcatgttatagaacaagacagaaggcagtatgaccaaagttttaaaatagataatggtgattttttgcaagggtcaccattttgtaattacttaatcgcgcatagcggcagtagccagcctttagttgatttttataatcgaatggcattcgactttggtacgcttggtaatcatgaatttaattatggattaccatacttaaaagacactttacgcagactcaattatccagttttgtgcgctaatatatatgaaaatgatagtacattgactgataacggtgtgaagtattttcaggttggagatcaaactgttggtgtgataggtttaacgacacaatttattccccattgggaacaaccagagcatattcagtcacttacgtttcatagtgcttttgaaatacttcaacaatacttacctgaaatgaagcgacatgcagatatcattgtggtttgttaccatggtggatttgaaaaggatttagaaagtggtacgccgaccgaagtattaacgggtgaaaatgaaggatatgccatgttagaagcgttttctaaagatatagatatctttattacgggtcaccaacatcgacaaattgctgaaaggtttaagcaaacggctgtgattcaacctggtacgagaggtacaactgtaggcagagtagtcttgagtactgatgaatatgaaaatctatccgttgaatcatgtgaattacttcctgttatagatgattccacatttactattgatgaagatgaccaacatttacgaaagcagttagaggactggttagattacgaaattactacattgccatatgatatgacgattaatcatgcatttgaggcacgtgtggcaccgcatccttttacaaattttatgaattacgctttattagaaaaaagtgacgcagatgttgcctgtacagctttgtttgattctgctagtggtttcaagcaagtcgtgacgatgcgagatgttattaacaattacccatttccaaatacatttaaagttttagctgtaagtggtgccaaacttaaagaagccattgaacgatcagcagaatattttgacgtgaaaaatgatgaagttagtgtgagcgcagacttccttggacccaaaccacaacactttaattatgatatatatggtggcgtaagttataccattcatgttggaagaccaaagggacaacgtgtgagcaatatgatgattcaaggtcacgcagttgatttaaagcagacatatacaatttgtgtaaataattatcgtgcagttggcggtggtcagtatgatatgtttatcgacgcgccagttgtgaaagatattcaagttgaaggcgcacaattacttattgattttttatcaaataataatttgatgcgtatcccgcaagttgttgattttaaagttgaaaagtgacggatatatgaaaaacttacttgattttaatcgggtaagtttttgtttaaagcgagaaagtattatctttagacgacgtgattgaaatgccacgtcctgtcaaaatgaatagtttattaaagttgtattttgatagaaatttactgacaccacaaaaattattgaattatttaaaagttgatgaaacatttttgaatcatctagcaggtattaatttaaaactctttaaggattatgttaatgaaaatagagaatataatataacgaatctatataaataaggcaccaatatttaaacctcgagctgaaaagatcatcatttcagttcgaggttttttattttatcctctttgtatgggtattcttttacttgaaatttgttttcctgtttttttattgtaaatttttattacatagtatcctaagttatatcctgacatttgttctccagtatttttagttttttagtaggaacataatggtatttttttgctgttagtggaacatattttttagggttttgaatttcgtttcatccatgtgtaaaactggatactctaatatccggtaatagccggttaaattgacataggatgtcactagctattccaaaattgtcttttgacgctataacgattgttgggaatcttagcatgtctaacgcagagagactttcacattttatgagtactaatcctgaagttcggctttgggatattttacaaacaaactttaaagctaaagctcttaaagaaaaagtttatattgaatatgacaaaataaaagcaactctttggaatagacgtagtatgcgcgttgaatttaatcctaataagctttcgcatgatgaagtgctttggttaaaacaaaatatcatcagttatttggacgatgttagttttacgagattagatttggcttttgattttgaatttgatttaaatgactattatgcattgtcagataagtcggcaaagaaaactatattttatggacgtaatgtaaaaccagaaacaaaatattttggtgtgcgtaatagtgataggtttattcggatttataataaaaacaagaacgtaaagataatgcagatgttgaaattgattcaacatttctatggcgtgtggaaattgaattaaaacgagatatggttgattgttggaaagattgttttgatgatttgcatattttaaaaccgaatttaaaaatgattgaaaatatacaagaacgagcaatgcttcatttattaactcacgaagaagaggaatggggaaatttagaaagacgtactaaaaataaatatagagataagttgaaaaatatagcgtctattgatttgacagatttaatgaaaatatctttaagaggaaatgaaaaccaattgcaaaaacaaatcgacttttggttgaattaattattataactaaagaactatgttcaatttatgtgcaatcatgcttttttgtccccacgttttgaacatgtttggcaccgccaaaccactcattttttgcaaaattttgcaaaaaaatggggacatgttcacttatgctcatctacttaaaataagtatttttttgttggtttttaaaagtagttgaaatgtttataataatattgaaagatatttctgttttccttttgaataataaacttaaaagagaatataaaataatgcttattaaaattaggggtggaaatatgaaaagagatttttttgaaaagtggtcgtttattttaaatttaattttattttgtgcttttttgtttttagtggttctgatgttttataaggatgtcgatttgatttatattttttgtacattattaatatcattattacctttgctaaatattataaaaagatataagaaaaagacggataattaatccgtctttttttatgaaaagaataggctgggaaataaatcaatcttctatgatctacgaagttatattggcagtagttgactgaacgaaaatgcgcttgtaataagctttttcaattctagtcaggggccccaacatagagaattcgaaaagaaattctacagacaatacaagttggggtgggacggcgaaataaattttgcgaaaatatcaattctgtcccactccccagaaaaggttctaccattgtcaaaaaaatgcatctctacatgttagagtaaatattggtcagccaaccaaaataatcaacacgaggagatgctatttaatgtcatctgacacaaacagtttagcacatacaaaatggaagtgtaagtaacatattgtctttgcacctaaatacagaagacaagtgatatatggaaaaataaaaaagatatagggattatattacgtcaattatatgaaagaaaaggtgtagagataattgaagcagaggtatgtaaagatcatatccatatgttagtaagtataccacccaaacttggggtatcatcatttgttggctatttaaaaggaaaagtaatttaatgatatttgatagacatgctaacttaaagtatagatatggaaatagaaagttttggtgtaaaggattttatgtggatacagtaggtggaaataaaaaagtgattgaaaattatattcgtaatcaattacaagaggatatcgttgcagacgaaatctcaatggaagaatatttagatcctttcactggagagaaaaataaaaaaagaaagaaaaaagagtaaacctttagggttgctggaatagtagtgcagttggctgacttgtcagtgcccttttagggctggccagtaaggaaggcttatagccgcagaacaaaccacccgttcacacgggtggtttttttgtgtaacatctgttgataggtagcgacaaggaccttttaatgttgtgttttgtgcgatataacaagctttttaggctattaaagaatattcagaattaaatatataattatgaaaaaattatgtcattgaaaaaattatgattataaaatcattctaaaaacaccgaaataacaatgatttcatgaaaacatttattttaaaatttgatatttgttcaaataatattcgaaattaaacttttttgtatagaattttctttatatcctgagagacatgtactataatgtttgtgaaataattcacaaagtataaaggagtggttgtatatgttaactatacctgaaaaagaaaatcgtggatcgaaagaacaagaagtggcaattatgattgatgctctagctgacaaagggaaaaaagcattagaagcattatctaaaaagtcacaagaagaaattgatcatattgttcatcaaatgagcttagcagctgttgatcaacatatggtgctagcaaaattagcacatgaagaaactggaagaggtatatacgaagataaagcgattaaaaatttatacgcttctgaatatatatggaattcaataaaagacaataagacagtagggattattggtgaagataaagaaaaaggattaacgtatgtagcggaaccaattggtgttatttgtggtgttacgccaacaacaaatcctacgtcgacaactatttttaaagcgatgattgcaattaagacaggaaatccaatcatttttgcattccatccaagtgcacaagaatcgtcgaagcgtgcagcagaagttgtattagaagcggcaatgaaggcaggtgcacctaaagatattattcaatggattgaagtgccttctatcgaagcaacaaaacaattaatgaatcacaaaggtattgcattagttctagcaacaggtggttcgggcatggttaagtctgcatattcaactggcaaaccggcattaggtgtgggaccaggtaacgtgccgtcttacattgaaaaaacagcacacattaaacgtgcagtaaatgatatcattggttcaaaaacatttgataatggtatgatttgtgcttctgaacaagttgtagtcattgataaagaaatttataaagatgttactaatgaatttaaagcacatcaagcatattttgttaaaaaagatgaattacaacgcttagaaaatgcaattatgaatgaacaaaaaacaggtattaagcctgatattgtcggtaaatctgcagttgaaatagctgaattagcaggtatacctgtccccgaaaatacaaaacttatcatagccgaaattagcggtgtaggttcagactatccgttatctcgtgaaaaattatctccagtattagccttagtaaaagcccaatctacaaaacaagcacttcaaatttgtgaagacacactacattttggtggattaggacacacagccgttatccatacagaagatgaaacattacaaaaagattttggactaagaatgaaagcttgtcgtgtacttgtaaatacaccatcagcggttggaggtattggtgatatgtataacgaattgattccgtctttaacattaggttgtggttcgtacggtagaaactcaatttcacataatgttagtgcgacagatttattaaacattaaaacgattgctaaacgacgtaataatactcaaattttcaaggtgcctgctcaaatttattttgaagaaaatgcaatcatgagtctaacaacaatggacaagattgaaaaagtgatgattgtctgtgaccctggtatggtcgaattcggttatacaaaaacagttgagaatgtattaagacaaagaacggaacagcctcaaattaaaatatttagcgaagtcgaaccgaatccatcaactaatacagtatataaaggtctggaaatgatggttgatttccaaccggatacaatcattgcacttggtggtggttcagcgatggatgctgcaaaagcaatgtggatgttctttgaacaccctgagacatcattcttcggtgctaaacaaaagttcctagacatcggtaaacgtacttataaaataggcatgcctgaaaatgcgacgttcatttgtatccctacgacatcaggtacaggttcagaagtaacaccatttgcagttatcacagatagtgaaacaaatgtaaaatatccgttggctgattttgctttaacacctgatgttgcaattattgaccctcaatttgtgatgagtgtgccaaaaagcgttacagcagatacaggaatggatgtactaacgcatgcaatggaatcatatgtatctgtaatggcttcagactacacaagaggtttgagtctacaagcgattaaattgacgttcgaatatttaaaatcatctgttgaaaagggtgataaagtttcaagagagaaaatgcataacgcatcaactttggctggtatggcatttgcaaatgcattcttaggtattgcacactcaattgcacataaaattggtggcgaatatggtattccgcatggtagagcgaatgcgatattactaccgcatattatccgttataatgccaaagacccgcaaaaacatgcattattccctaaatatgagttcttcagagcagatacagattatgcagatattgccaaattcttaggattaaaaggtaatacgacagaagcactcgtagaatcattagctaaagctgtctacgaattaggtcaatcagtcggaattgaaatgaatttgaaatcacaaggtgtgtctgaagaagaattaaatgagtcaattgatagaatggcagagctcgcatttgaagatcaatgtacaactgctaatcctaaagaagcactaattagtgaaatcaaagatatcattcaaacatcatatgattataagcaataatctatctgataataatcatataactcacctgaaattacaaaagtaaaaaatgccacataaactttaagtcgataatcattatacggttatcggcttttatttattgccaaatcttcagagagatacaaactagacaatcatttttttaaataaagaaaatattaagatttatactcatttcgcaaactattactactttagagtataattatttttaatttcatataaatgaaaagtctaaaataatgcggtttaaaagtaattaattgtttaaacgatatgtaatatataaatactatatatataataccaattttaatgaaaatttttaagggaggtaaataatggaaagtacattagaattaacaaaaattaaagaagtattacaaaaaaacttgaagattttaattattttaccgctattatttttaattattagcgctattgttacatttttcgtcttatcacctaaatatcaagctaatactcaaatcttagtgaatcaaactaagggtgacaatcctcagtttatggcacaagaggttcaaagtaatattcaacttgtaaatacgtataaagaaattgttaaaagtcctagaattttagatgaggtgtcaaaggacttaaatgataagtattcaccatctaaattgtcgagtatgttgacaattacaaaccaagaaaatacgcaacttatcaacatccaagttaaaagtggtcataaacaagattcggaaaaaattgcgaatagcttcgctaaagttacaagtaaacaaattccgaagattatgagtgtggataacgtatcaattttatctaaagcagacggtacagcagttaaagtcgcaccaaaaactgtagtgaatctaatcggtgcattctttttaggattagttgtcgcgcttatatatatcttcttcaaagtaattttcgataagcgaattaaagatgaagaagatgtagagaaagaattaggattgcctgtattgggttcaattcaaaaatttaattaaggatggttgctacttatgtcaaaaaaggaaaatacgacaacaacactatttgtgtatgaaaaaccaaaatcaacaattagtgaaaagtttcgaggtatacgttcaaacatcatgttttcaaaagcaaatggtgaagtaaagcgcttattggttacttctgaaaagcctggtgcaggtaaaagtacagttgtatcgaatgtagcgattacttatgcacaagcaggctataagacattagttattgatggcgatatgcgtaagccaacacaaaactatatttttaatgagcaaaataataatggactatcaagcttaatcattggtcgaacgactatgtcagaagcaattacgtcgacagaaattgaaaatttagatttgctaacagctggccctgtacctccaaatccatctgagttaattgggtctgaaaggttcaaagaattagttgatctgtttaataaacgttacgacattattattgtcgatacaccgccagttaatactgtgactgatgcacaactatatgcgcgtgctattaaagatagtctgttagtaattgatagtgaaaaaaatgataaaaatgaagttaaaaaagcaaaagcacttatggaaaaagcaggcagtaacattctaggtgtcattttgaacaagacaaaggtcgataaatcttctagttattatcactattatggagatgaataagtatgattgatattcataaccatatattgcctaatatcgatgacggtccgacaaatgaaacagagatgctggatcttttaaaacaagcgacaacacaaggtgttacagaaatcattgtaacatcacatcacttacatcctcgatataccacacctatagaaaaagtgaaatcatgtttaaaccatattgaaagcttagaggaagtacaagcactaaatctaaagttttattatggtcaggaaataagaattaccgatcaaattcttaatgatattgatcgaaaagttattaccggtattaatgattcacgctatttactaatagaatttccatcaaatgaagttccacactatactgatcaattatttttcgaattacagagtaaaggctttgtaccgattattgcacatccagagcggaataaagcaataagtcaaaaccttgacatactatacgatttaattaacaaaggtgctttaagtcaagtgacaacggcgtcattagcgggtatttccggtaaaaaaaatagaaaattagcaattcaaatgattgaaaacaatctgacacatttcatcggttcagatgcgcataacacagaaatcagaccgttcttaatgaaagacttatttaatgataagaaattacgtgattattatgaagatatgaacggatttattagtaatgcgaagttagttgttgatgataaaaaaattcctaaacgaatgccacaacaagattataaacagaaaagatggtttgggttataaacagcaaatgaggggttttatggcacatttatctgtgaaattgcggcttttaatactagcattaatcgattcactgatagtgacattttcagtattcgtaagttattacattttagaaccgtatttcaaaacatattctgtcaaattattaatattggcagctatatcactattcatatcgcatcatatttcagcatttatttttaatatgtatcatcgagcgtgggaatatgccagtgtgagtgaattgattttaattgttaaagctgtgacgacatctatcgttattacgatggtggtcgtgacaattgttacaggcaatagaccgttttttagattgtatttaattacttggatgatgcacttgattttaataggtggctcaaggttattttggcgtatttatcggaaataccttggaggtaagtcatttaataagaagccaactttagttgttggtgctggtcaagcaggttcaatgctgattagacaaatgttgaaaagtgacgaaatgaaacttgaaccggtattagcagtcgatgatgacgaacataaacgcaatatcacaattactgagggtgtaaaagtccaaggtaaaattgcagatattccagaactagtgaggaaatataagattaaaaaaatcatcattgcaattccaactattggtcaagagcgtttgaaagaaattaataatatttgccatatggatggcgttgagttattgaaaatgccaaatatagaagacgtcatgtctggtgagttagaagtgaaccaacttaaaaaagttgaagtagaagatttactaggcagagatcctgttgaattagatatggatatgatatcaaatgaattgacgaataaaactattttagttacgggtgcaggtggttcaataggatcagaaatttgtagacaagtttgtaatttctatccagaacgtattattctacttggccatggtgaaaacagtatttatttaatcaatcgtgaattgcgaaatcgcttcggaaaaaatgttgatatcgttcctattatagcggatgtgcaaaatagagcgcgtatgtttgaaattatggaaatgtataaaccatacgcagtttatcatgcagcagcacacaagcacgtgccgttaatggaagacaaccctgaagaagcagtacgtaataatattttaggtacgaaaaatactgctgaagctgctaaaaatgcagaggtaaagaaattcgttatgatttctacggataaagccgttaatccgcctaatgtcatgggcgcttcaaagcgaattgcagaaatgattattcaaagtttaaatgatgaaacgcatcgaacaaattttgttgcagtgagatttggtaatgtacttggatcgagaggatctgtgattccacttttcaaaagtcaaattgaagaaggtgggccagttactgtgacacatcctgaaatgacacgttactttatgacaattcctgaagcttctagactagttttgcaggcaggggcattagcagaagatggcgaagtatttgtgctagatatgggagaaccagtgaaaattgtagatttggcacgtaatttaattaagctaagtggtaaaaaagaagacgacatacgcattacttatacagggattagacccggcgaaaaaatgtttgaagagcttatgaataaagatgaggttcatcctgaacaagtatttgaaaaaatatatcgtggcaaagtacaacatatgaaatgtaatgaagttgaagcgattattcaagacatcgtcaatgactttagtaaagaaaaaattattaactatggcaatggcaaaaagggagataattatgttcgatgacaaaattttattaattactgggggcacaggatcattcggtaatgctgttatgaaacggtttttagattctaatattaaagaaattcgtattttttcacgcgatgagaaaaagcaagatgacattcgaaaaaaatataataattcaaaattaaagttctacattggtgatgtgcgtgatagtcaaagtgtagaaacagcaatgcgagatgttgattacgtattccatgcagcagctttaaaacaagtgccgtcatgtgaattctttccagttgaggcagtgaagacaaatattattggtacagaaaatgtcttacaaagtgctattcatcaaaatgttaaaaaagtcatatgtttatctacagataaggcagcgtatcctattaatgctatgggtatttcaaaagcaatgatggaaaaagtattcgtagccaaatcaagaaatattcgtagtgaacaaacgcttatttgtggtacaagatacggtaatgtgatggcttcaagaggatcagtaatacctttgtttatcgacaaaatcaaagctggagaacctttaacgattacagatcctgatatgacaagatttttaatgagcttagaagatgcggtagaactagttgttcatgcatttaagcatgcagagacaggagatattatggttcaaaaagcaccaagctcaacggtaggggatcttgcgaccgcattattagaattgtttgaagctgataatgcaattgaaatcattggtacgcgacatggagagaaaaaagcagaaacattgttgacgagagaagaatacgcacaatgtgaagatatgggtgattattttagagtgccggcagactccagagatttaaattatagtaattatgttgaaaccggtaacgaaaagattacgcaatcttatgaatataactccgataatacacatattttaacggtggaagagataaaagaaaaacttttaacactagaatatgttagaaacgaattgaatgattataaagcttcaatgagataggagagattgacgttgaatattgtaattacaggagcaaaaggttttgtaggaaaaaacttgaaagcagatttaacatcaacgacagatcatcatattttcgaagtacatcgacaaactaaagaggaagaattagagtcagcattgttgaaagcagactttgtcgtgcatttagcgggtgttaatcgacctgaacatgacaaagaattcagcttaggaaacgtgagttatttagatcatgtacttgatatattaactagaaatacgaaaaagccggcgatattattatcgtcttcaatacaagcaacacaagataatccttatggtgagagtaagttgcaaggggaacagctattaagagagtatgccgaagagtatggcaatacggtttatatttatcgctggccaaatttattcggcaagtggtgtaagccgaattataactcagtgatagcaacattttgttacaaaattgcacgtaacgaagagattcaagttaatgatcggaatgttgaactaacgctaaactacgtggatgatatcgtcgctgaaataaagcgtgctattgaaggaactccaacgattgaaaatggtgtacctacagtaccaaacgtatttaaagtgacattgggagaaattgtagatttattatacaagttcaaacagtcacgtctcgatcgaacattgccgaaattagataacttgtttgaaaaagatttgtatagtacgtatttaagctatctacctagtacagactttagttatcccttacttatgaatgtggatgataggggttcttttacagaatttataaaaacaccggatcgtggtcaagtttctgtaaatatttctaagccaggtattactaaaggtaatcactggcatcatactaaaaacgaaaaatttctagtcgtatcaggtaaaggggtaattcgttttagacatgttaatgatgatgaaatcattgagtattacgtttctggcgacaaattagaagttgtagacataccagtaggatacacacataatattgaaaatttaggtgacacagatatggtaactattatgtgggtgaatgaaatgtttgatccaaatcagccagatacgtatttcttggaggtatagcgcatggaaaaactaaaattaatgacaatagttggtacaaggcctgaaatcattcgtttatcatcaacgattaaagcatgtgatcaatattttaatcagatattagtacacactggtcaaaattatgattatacattgaatcaaattttctttgatgatttggaattgagacaaccggaccactacttagaggcagttggaagtaaccttggagaaacgatggggaatattattgcgaagacatatgacgttttattacgcgaacaaccagatgcacttttaattcttggtgatacaaatagttgtttagcagcagtatctgctaaacgattaaagattcctgtgttccacatggaagcgggtaatagatgctttgatcagaatgtacctgaagaaatcaatcgtaaaattgttgaccatgtcagtgatgtgaatctaccttatacggaacatagcagacgttatttattagatgaaggcttcaataaagcgaatatctttgtgacaggatcaccgatgacagaagtgatagaagcgcatcgagataaaattaatcacagtgacgttttaaataaactaggattagaaccgcaacaatacattttagtatctgcgcatagagaagagaatatcgataatgaaaagaattttaaatcattaatgaatgcgataaatgatattgccaaaaagtataaaatgcctgtgatttattcaacgcatccaagaagttggaagaaaattgaagaaagtaaatttgaatttgatccattagttaaaaagttaaagccatttggtttctttgattataatgcattgcaaaaagatgcatttgttgtgctatcagatagtggaacattgtcagaagagtcgtctattttgaagttccctggtgtccttattcgaacttccacagaaagaccggaagtactagataaaggtacggttattgtaggtggtattacctataacaatctaatccaatccgttgaactagcaagagagatgcaaaacaataacgaaccgatgattgatgctattgattataaagacactaacgtttcgacaaaggtagttaaaattattcaaagttataaagatattatcaatcgaaatacttggaggaaatgacgatgaggatagcgattgaaaagataattggtttgctgaaaaaccagtcctctaaagaatcgaatgttaagattcatcgcttggcgtatattacaaactcaaaatttgatggcaataactatatagatagatggtgtaaaatcaggaattctcacattggtgaatacagttatattggatttggtagtgattttaataatgtagaagtaggaagatattgttcgatatcttcggatgtaaaaattgggttaggaaaacatcctacacacttttttagctcatcaccgattttttattctaataataatccatttaacataaagcaaaagtttatagactttaatgaccaaccaagccgtacaacaattaaaaatgatgtgtggattggtgcaaatgtaattattatggatggtttaacaataaatactggtgcagtcatagcagccggctcagttgttactaaaaatgtaggagcatatgaggttgttggtggggttcctgcaaaagtgattaagaagcgatttgacaataaaacaattgaaaaacttttggaaagcaagtggtgggagaaaacgcctgataaactaaaaggattttcggttgaatatttaaataaaaaggatacttaatgatatgagaattttaaatattgtatcgagtaatattgttcaagacccaagggtacttaaacaaatagaaacaattaaagacgttacggatgattataaaattgttggaatgaataattcacaagctactaataagcgattggaaaatttagattgtaattatcgtttgttaggtagcaaggtagatccaaaaaatattctttctaaattaattaagcgtataagatttgcaacaggtgttatccgagaaattaaagcttataaacctgacgtgattcatgcaaatgatttcgacgtattattaatggtctatttaagcaattataaaaaagctaatattgtttatgatgcgcatgaaatatatgcgaaaaatgcctttattaataaagttccacttatttcaaagtttgtagaaagtatagaaaaacacatagtaaaacatcgtgttaatgccttcgtaacagtaagtcatgcagcaaaagaatattatcaatctaaaggatataagaaggaagcgaatgttattacgaatgcacctattttaaatgatagcagagaatttaaagaaatcgaaaactttaaagaaattgtatatcaaggtcaaattgtaatggacagaggatatgaagagtttattattgcttcatcagcttttaaacaaaatgctccttcattcataattcgagggtttggtccgcatgaagaagtgataaaagaactgattagttataactcggaaaatattaggttggataaaccagttgaagtaaaagaattggttgataagttagcagaaagtaatgttggtgttatcttgacgaaacctgtatctattaattttgaatatacagtatctaataaaatttttgaatgtatacatgctggtttaccagtaattttatctcctgtcaaagagcatatttatctcaatgaaaaatataaatttggcattgttttaaaggaagttacgccgttagaaattgaaaaggcggttagaaaattaagagataatcacgatttgtttaatcatttacgtcaaaatgcaattaaggcgtctaaaattttgaattggcaaatagaaagtgaacgattagtagaattatataaattttaaagagaggtaaactatgaaattttttgtactttgtgcaattatcagcatgaacatatttatagtaatctctacatttactaaagaagtattagggttccctatagagccggtgtattactcaaccatggttggtatagcattaattactacggtgtttgctatttataagataattgtcacgcaagaaattccgcgagggttaatattattaattgctatatgtttgctttatctagctttttattatttttcaccagataaggaagagaaactagctaaaaataatattctattctttttaacatgggcagttccagcggcaattagtggtatttatattaaatatataaacaaggctacggtagaaagattttttaaattagtatttttcatattttctatttcatttatttttgtaattttaataccaaaacttacaggtgagatacctagctatatcaattttggacttatgaactatcaaaacgcttcgtacctttcagcatttactgccggattaggcatttatttcattatgaaaggttcagtgaaacataagtggatatatgttctatttacaataattgatatccctattgtgtttataccaggagggcgtggaggtgctattttattaattctttacggcttatttgcatttatacttattacgtttaaaagaggaatacctattgcagtaaaaagcattatgtatatttttgcattaagcatatctagtgtattgatttactttctttttacaaaaggttcgaatactagaacattttcatatctacaaggtggaacacttaatttagaaggtacttctggaagaggaccgatttatgaaaaaggtatttactttattcaacaaagtccgttattaggctatgggccatttaactattataaactaatcggaaatataccacataacatcattattgagttgattctatcatttggcttattagggttttttatcataatgatttgcattttgctactagtttataaaatgattaggaactatgatccaaacactatagatttactcgttatgtttatagcaatctatccaatcacattattaatgtttagttcaaattatttagttgtaagtgaattttggtttgtgttgttctattttattacaaaaggacggcgtcatcatggttaagaaagtttttattatggatagcgtaaagacaataattggtacgttgcttatagctttaggattacaatttttagcttatccaattattaatcaacgagtaggtaatgaagcgtttggttctattttaacgatttatacaataataacaatcacgagtgttgtattaggcaatacgcttaacaatatacgattaattaatatgaatctatacaaatccaatcattactactggaaatttgtgtcgatacttttaatttcaattctgattgagagtatagctttaattattgtatttctttacttttttaatttgaacaccatcgatattatctttttaattctacttaatattttaatgtgtttaaggatttatctgaatgtattttttaggatgactttaaaatataatcagattttgtatattgctcttattcaatttttaggtttgctgataggactatttctatattatttaatccaaaactggattgtttgttttattaccagtgaattgtttgcaacgatatatacattggttaaattacggggattaactataggcgagtatcaaagtgaagataataatgtggtcaaagattatgtgatgctactgagtacaaatagccttaataatttgaatctctacttagatagattaatcttattaccaattataggtggaacagctgtaactatatcatttctttcaacatttattgggaaaatgttagctacatttctgtatccgattaataatgtagtactttcatatatttctgtaaatgaaagcgacaatataaagaagcaatatttgaaaactaatctatttgctatagctgcactatgtttagtcatgattatatgttatccaattacattaattattgtctctttactgtataacattgattcaagtttatattcgaagtttattattttaggtaatataggtgttttattcaatgcagtgagtattatgatccaaactttaaatacaaaacacgcatcaataacattacaagcgaattatatgacgcttcacacgattacatttatattcataactattttaatgacaattgcgtttggtctaaatggattcttttggacaacgctgttcagcaacattattaagtatgtgattttaaatattataggtttaaagtctaaattcattaataaaaaggacgtcgattagatgagtgaaaaaaagattttgattttatgtcagtatttttatccggaatatgtatcttctgcgacgttaccaactcaattggcggaagatttaattgcgaatcacattaatgtcgatgtcatgtgtggatggccatatgaatatagtaatcataaacaggtttctaaaaccgagatgcatcgtggtattcgcattcgacgtctcaagtattcgaggtttaataacaaaagtaaggttggaaggatcatcaatttctttagtttattttcaaaattcgtgattaatatacctaaaatgttgaaatatgatcagattcttgtttactctaatccaccaatcttgccattaataccagacgttttacacagactgcttaagaaaaaatattcttttgtagtgtatgatatagcacctgataatgcgattaagacaggtgcaactcgtccaggtagcatgattgataagctgatgcgttacattaatagacatgtctacaagaatgctgaaaatgtcattgtccttggtacggaaatgaaaaactacttactaaatcatcaaatttctaaaaatgctgacaatatccatgtgattcctaactggtatgacatgcgtcaattacaagacaatcgtatctataatgacacatttaaagcttaccgtgagcaatacgacaaaattttattgtatagcggtaatatggggcagttacaggatatggagacacttatctcatttttaaaattaaataaggatcagcctcaaacgttaacaatactttgtggtcatggtaagaaatttgcagatgtcaaaacggcaatagaagaccatcgtattgaaaatgttaaaatgtttgagtttttaacaggtacagactatgctgacgtattaaaaattgcggatgtatgtattgcatcgctgattaaagaaggcgtcggtttaggcgtgccgagcaagaattatggctatcttgcagctaagaaagcgttggtactcatcatggataagcaatctgatatcgttcaacatgttgaacaatatgatgcgggtatccaaattgataatggcgatgcacatgccatttataacttcatcaacactcactcgagtaaggaattgcacgagatgggtgagcgcgcacatcaactgtttaaagataaatatacgagagaaattaatactatgaagtattacaatctgttgaagtgaggagataattatgaagcgattattcgatgtagtgagttcaatatatggtttagtagttttaagtccgattctgttaattacagcattactaattaaaatggaatcacctggaccagccattttcaaacaaaaaagaccgacgattaataatgaattgtttaatatttataagtttagatcaatgaaaatagacacacctaatgttgcaactgatttaatggattcaacatcgtatataacaaagacagggaaggtcattcgtaagacctctattgatgaattgccacaattattgaatgttttaaaaggagaaatgtcaattgtaggtcctagaccagcgctttataatcaatacgaattaatcgaaaaacgtacaaaagcgaacgtgcatacgattagaccaggtgtgacaggactagctcaagtgatggggagagatgatatcactgatgatcaaaaagtagcgtatgatcattattacttaacacatcaatctatgatgcttgatatgtatatcatatataaaacaattaaaaatatcgttacttcagaaggtgtgcatcactaatgagaaaaaatattttaattacaggcgtacatggatatatcggtaatgctttaaaagataagcttattgaacaaggacatcaagtagatcaaattaatgttaggaatcaattatggaagtcgacctcgttcaaagattatgatgttttaattcatacagcagctttggttcacaacaattcacctcaagcaaggctatctgattatatgcaagtgaatatgttgctgacgaaacaattggcacaaaaggctaaagctgaagacgttaaacaatttatttttatgagtactatggcagtttatggaaaagaaggtcaggttggtaaatcagatcaaattgatacacaaacaccaatgaaccctacgaccaactatggtatttccaaaaagttcgctgaacaagcattacaagagttgattagtgattcgtttaaagtagcaattgtgagaccaccaatgatttatggtgcacattgcccaggaaatttccaacggttaatgcaattgtcaaagcgactgccaatcattcccaatattaacaatcagcgcagtgcattatatattacacatctgacagcatttattgatcaattaatatcattagaagtgacaggcgtgtatcatcctcaagatagtttttactttgatacatcgtcagtaatgtatgaaatacgtcgccaatcacatcgtaaaacggtattgatcaacatgccttcagtgttaaataagtattttaataagttgtcggtctttagaaaattatttggcaatttaatatacagcaatacgttatatgataataataatgcacttgaagttattcctggaaaaatgtcacttgttattgcggacatcatggatgaaacgacaaccaaagataaggcataagtcatctattaaataaaatcaacatacaaatcgttttatttggaggttatagtatgaagttaacagtagttggcttaggttatattggtttaccaacatcaattatgtttgcaaaacatggcgtcgatgtgcttggtgttgatattaatcagcaaacgattgataagttacaaagtggtcaaattagtattgaagaacctggattacaagaggtttatgaagaggtactgtcatcgggaaaattgaaggtatctacaacgccagaagcatctgatgtttttatcattgccgttccgacgccgaataatgatgatcagtaccggtcatgtgacatttcgctagttatgcgtgcattagatagtattttatcatttttagaaaaaggaaatactattattgtagagtcgacaattgcgcctaaaacgatggatgattttgtaaaaccagtcatcgaaaatttaggatttacaataggtgaagatatttatttagtgcattgtccagaacgtgtactgccaggaaaaattttagaagaattagttcataacaatcgtatcattggcggtgtgactaaagcttgtattgaagcgggtaaatgtgtctatcgcacattcgttcagggagaaatgattgaaacagatgcacgtactgctgaaatgagtaagctaatggaaaacacatatagagacgtgaacattgctttagctaatgaattaacaaaaatttgcaacaacttaaatattaatgtattagatgtgattgaaatggcaaacaaacatccgcgtgttaatatccatcaacctggtccaggtgtaggcggtcattgtttagctgttgatccgtactttattattgctaaagaccctgaaaatgcaaagttaattcaaactggacgtgaaattaataattcaatgccggcctatgttgttgatacaacgaagcaaatcatcaaagcgttgagcgggaataaagtcacagtctttggtttaacttataaaggtgatgttgatgatataagagaatcgccagcatttgatatttatgagctattaaatcaagaaccagacatagaagtatgtgcttatgatccacatgttgaattagattttgtggaacatgatatgtcacatgctgtcaaagacgcatcgctagtattgattttaagtgaccactcagaatttaaaaatttatcggacagtcattttgataaaatgaagcataaagtgatttttgatacaaaaaatgttgtgaaatcatcatttgaagatgtatcgtattataattatggcaatatatttaattttatcgacaaataaaatgtgtcaaactagggcatacatgattaaggaaagataagctgtcatgtgtttgaacttcagagaggataatgttatgaaaaaaattatggttattttcggtacgagacccgaagcaataaaaatggcaccattagtaaaagaaattgatcataatgggaactttgaagcgaacattgtgattacagcacaacatagagatatgttagatagtgtgttaagtatatttgatattcaagctgatcatgatttaaatattatgcaagatcaacaaacattagcaggccttacggcgaatgcgcttgctaaacttgatagcatcattaatgaggaacaaccggatatgattttagtacatggtgatactacaacgacttttgtaggaagtttggcagcattttatcatcaaattccggtcggacatgtagaagctggacttcgaacacatcagaaatactcaccatttcctgaagagttaaatcgagtcatggtaagtaatattgctgaattgaattttgcgccaacagtaattgcagctaaaaatttactttttgaaaacaaagacaaagagcgtatctttattactggaaatacagttattgacgcattgtcaacaacagttcaaaatgattttgtttcaacgattattaataaacataaaggcaagaaagttattttactaacagcgcatcgtcgtgaaaatattggggaaccgatgcatcagatttttaaagcagtaagagatttggcagatgaatataaagatgttgtcttcatttatccaatgcatcgtaatccaaaggtaagagcgattgccgaaaaatatttatctgggagaaatcggattgaattaattgagccattagatgcgattgagttccataattttacaaatcaatcgtacctcgtgctgacagattctggtggtattcaagaggaggctcctacatttggaaaacctgtgttggtattaaggaatcatacagagcgtcccgaaggcgttgaggcgggaacatcgagagtaattggcacagattatgacaatattgttcgaaatgtgaaacaattgattgaggatgatgaagcgtatcaacgtatgagtcaagcgaataacccatatggtgatggacaagcatcacgacgtatttgtgaagcaatagaatattattttggattgcgctcagaaaagccggatgaattcgtacctttacgtcacaaataataaaaaacccctaatcatgaagttggtttagacaaccagcggtgactaggggtttttaatatatttatttttgatagtggtagccaatatcatatttgaatactttatttgataatattggactttgctgtccatcgtcatcactttttaaacgtacatttttatgagcttctttaaatacatcggaattcaaccaattattaaagctatcttcagattcccaaatagttaagattttaacttcgtctgtatcctcagtatttaatgttttagtgacaaacatttgttggaagccttcaatagtttcaatgccttgtctattgtaaaaacgttcaatcgtttcttccgcactgcctttttgtaattgtaatctattttctgccataaacatgggcaatcactcctctattttatgatttgatttgggtaatgtttttacaaatgtaaagagtacagcggtttgtatgataaccattatgattaatcctatacgtactgcaagaacatccaccatataaattgaaaaacctattacaatgtataagctaattaaaattttaattttctgttgtagcgtgtagcctcgatgtaaataaaagttttctacatattctttataaattttttgattaataagccaattgtaaaagcgatctgaacttcgagcaaaacaaaaaactgctacgagtaaaaaaggggtcgttggcagtaaaggtaatacggcacctgcaataccaagcgctgtaaatattaagccaatgacgattaaaataagtcgcattgaaaaaactccattctagtactaatgcgcatgtaatattgttttagtaatataactcatgctaaatataatgtgtatgataagtgcaatgactcagtaaaatgaaacgttgttgaattattcttgtcccattaacgcattttaagcgcgactttcataacaaccaaactatttaatgagaattattctcaagtattatagttatattatgtgttttatttttgaaaagtgcaatatgttttcgaaaataagattatttttatgtgcaaaaacgacgcaaaagttttaaaaatgagacttctgtgagctgattattttataaaatgtaaacgcttactatataatgtgaatcatatcgtttaaaagcattattaaatatgatgctaagagatttatattatagccaataaacaaaggagagataatatggcagtaaacgttcgagattatattgcagagaattatggtttatttatcaatggggaatttgttaaaggtagcagtgacgaaacaatcgaagtgactaatccagcaactggagaaacactatcacatattacaagagcaaaagataaagatgtcgatcatgcagtcaaagtggcgcaagaggcatttgaatcatggtcattaacttctaaatcagaacgtgcacaaatgttgcgtgatattggtgataaattaatggcacaaaaagataaaattgcaatgattgaaacattaaataatggtaaaccgattcgtgagacaacagcaattgatattccatttgctgcaagacatttccattatttcgcaagtgttattgaaacagaagaaggtacagtgaatgatatcgataaagacacaatgagtatcgtacgacatgagccgattggcgtcgtaggtgctgttgttgcttggaacttcccaatgctattagctgcatggaagattgcgccagccattgctgcaggtaatacaattgtgattcaaccttcgtcttcaacaccattaagtttattggaagttgctaaaattttccaagaggtattacctaaaggtgttgtcaatatactaacgggtaaaggttcagaatcaggtaatgcaattttcaatcatgatggtgtagataaattatcatttacgggctcaactgatgtaggttatcaagttgccgaagctgcagcaaaacatctagtacccgctacattagagcttggtggtaaaagcgccaatatcatattagatgatgctaatttagacattgcagttgaaggtattcagttaggtattttattcaaccaaggtgaagtatgtagtgcaggttctcgattattagttcatgaaaaaatttataatcaattggtgccacgtttacaagaggcattttcaaatattgaagttggagacccacaagatgaagctacacaaatgggtagtcaaactggtaaggatcaattagataaaattcaatcatatattgatgcagcaaaagaatcagatgcacaaattttagcaggcggtcatcgcttaactgaaaatggattagataaagggttcttctttgagccgacattaattgctgtgccagacaatcatcacaaattagcacaagaagaaatatttggaccagtgttaacagttattaaagtgaaggacgatcaagaagcaattgatatagctaatgattctgagtatggtttagcaggcggtgtattttctcaaaatatcacacgtgcattaaatattgctaaagctgtacgtacaggacgtatttggattaacacttacaaccaagtaccagaaggcgcaccatttggtggttataaaaaatcaggtatcggtcgagaaacttataaaggtgcgttaagtaactatcaacaagttaaaaatatttatattgatacaagcaatgctttaaaaggtttgtactagaataaatatcgtttctgaagcgtgtttgtaggtcagtctagcggtaagtcttaacatttaacggcgttgtttagattttaagcaaaacaaaatatataggaacacgtatcatgatattaggatataatgactaaaataatagcagtaggatggtttttaattgcaaatcatcttactgctttttttaattatgctaatttgcgatgcggctattataaggacagagttgtttattaattatggtgatttagaaatatgaagttcaatatgcaaagtcatcgtttgttttaatatgtggaacaatcattaaagttattgtgattttttgaacttaatgaaactaaacaataaatttgagatacttttttgtcatttttatgtaactaacacaataatctcgtacattattaaaattttctatatgatagggataaagtaaagagcgagtgtgctgtaaaagtttttccaaggtgatattacataaaggtataaagggtaaagattaatgagttgtcatgtgaagaacgatggtgtataaattatggttaattacggaagcattaatattaatctgagaagctataaagaattatttttaaaagcgacaatattaaatacgacgcatttatttaggagtggcaaacgtatgaatgggaaaaaggcgaatacgataaacagatacaaatattttcatcatgtcaatcatcaaaaaattcaacaaagttctaaaaagacgttgtgggcatcactaatcatcacattgttatttacagtgattgaatttgtcggaggtttagtatctaattcattggcattactgtcagattcatttcatatgcttagtgatgtattagcacttggtttatctatgttggccatttattttgcaagtaaaaagccgactgcacgatacacatttggatatttaagatttgagatattagctgcatttttaaatggtttagcattaattgtaatttcaatctggattttatatgaagctattgtacgtattatttatccgcaaccaattgaaagtggcattatgtttatgattgctagtattggtttactcgttaatattattttgacaattatccttgtaaggtctttaaaacaagaagacaatatcaatattcaaagtgcattatggcatttcatgggagacttattgaactctattggtgtcatcgttgcagttgtattgatttactttacaggatggcgcatcatcgacccaatcattagtattgtaatttcactcatcattttacgtggtggttataaaattacgcgtaatgcgtggttaattttaatggaaagtgtgcctcaacatttggatactgatcaaattatggcagatattaaaaacatagatggcatattagatgtacatgaatttcatttgtggagtattacaacagagcattattcattaagtgcccatgttgtgttagataaaaaatatgagggtgatgattatcaagcgattgatcaagtatcatcattgttgaaagaaaaatatggcattgcacattcaacgttgcaaattgaaaacttgcaattgaatccattagatgagccatacttcgacaaattaacataaataaaacattgtacaggctgggacataaatcaatgttctatgctctacgaagttatattggcagtagttgactgaacgaaaatgcgcttgtaacaagcttttttcaattctagtcaggggccccaacacagagaatttcgaaaagaaattctacaggcaatgcaagttggggtgggacaacgaaataaattttgcgaaaatatcatttctgtcccactcccacgtttgttttggattatgttgcatcatttaaatgattttcgtcaatttctttgatgctatctacatctaacacgacatctttaggtttcaaaatatgaatatgtttttcatcatttgtatgtaaaatgcgttctatgatgtatctttgaccggccattgtttctacagcaatctttttgtttctagctaaacttgctacgacagattctttatccataatgatagccccctatatatatgtttatttacttataccctaacatgatttttatactctttgaaaatatattttacagaattttatctaaatatttaaaaaaatcgctcaatatccttgtaatccgataagaattatagtaatattttttcaaccattgttataggaggtcttattaatgacattatttttattagaagctaacaatcttgattttgcatcaacgaaagaagaactagaagcaaaggcagcatcactatctacgaagacaattccaacattaattgaagtacaagctactgaaaatttaactcatggttattttattgtggaagcaaatgacgaagcagaagctaaacaatttttaacagaagcagatattagtattcaattagtcaaagaagtacgcttagttggtaaagatttagatgaagttaaaaatggtgatgcacatgttgattaccttgtaacttggaacattccggaaggcattacgatggatcaatatttagcacgtaaaaagaaaaattctgttcattatgaagaagtgccagaagttgaatttaaacgcacatatgtatgtgaagatatgtctaaatgtatttgtttatacaacgcacctgatgaagaagcggtacgtcgcgcgcgaaaagcagttgatacaccgattgatggcatcgaaaaactttaataagacaacaagttgatgagatatatgtatataggtttgacgtggatttcgattgcagttaattagaatagctcaatgctataaatgtaagtagttgatatgaagaaactaatgaactaaatgcaagtattttctaaaacaatcattttattgaaatttagtagagctgaaattaatataacgtcgttaattgaataacgcttatgttataagagcactcataccaaaccataatcatctatagatataacaattcacgatataagggctgtgtttggcatagccctttagatatacacttaattcctattaaaatagtagggattaaaagggggcttgtcatgattaaaattcaacaattacaacatcactttggatcacttaaagtaattcataactttaatttggacattagcaagggagaaatagtcactttcatagggaaaagtggttgcggaaagtctactttactcaatattatcggtggatttattcatccatcgtctggtcgtgtcattattgataacgaaattaaacaacagccatctccagattgtttaatgctatttcaacatcataatttgctgccatggaaaacgattaatgacaacattaggattggatttcaacagaaaattagtgatgaagagattaacgcacagcttaaattagttgatttagaagacaggggaaagcattttcccgagcaactgtccgggggtatgaaacaacgtgtggcactatgtcgagcgcatgtgcataagcctaatgttatattgatggatgagccattaggtgcattagatgcatttacacgttataaacttcaagatcaactagtgcaactaaaacataaaacgcaatcaactattattttagtgacgcatgacattgatgaagctatttatctttccgaccgcattgttctgttaggtgaagggtgcaatattatttctcaatgtgaaattacagcatcacatccacgcagtcgtaatgatagccacctacttaagattcgtaatgaaattatggaaacatttgcattgaatcatcatcaagttgaacctgaatattatttataaggagtgagtgacgatgaaaaggttaagcataatcgtcatcattggaatctttataattacaggatgtgattggcaaaggacgtctaaagaaccgtctaaaaatgcccaaaatcagcaagtgattaaaattggatatttgccgattacacattcagctaatttgatgatgactaaaaaattattatcacaatacaatcatccgaaatataaactagaattagttaaattcaataattggccagatttaatggacgcattaaacagtggtcgtattgatggtgcatcaactttaatagagctagcgatgaaatcaaaacagaagggctcaaatataaaggctgtggcattgggccatcatgaaggcaatgtcattatgggacaaaaaggtatgcacttaaatgaatttaataatggcgatgattaccattttggtataccacatcgttattcaacacattatcttttacttgaggaattacgtaaacaattaaagattaaaccggggcattttagctatcatgaaatgtcgccagcagaaatgccagccgcattgagtgaacacagaattacagggtattctgtagccgaaccattcggtgcactgggtgaaaagttaggcaaaggtaagactttgaaacatggtgatgacgttatacctgatgcgtattgctgtgtgctagtactgagaggggaattgcttgatcaacacaaggatgtagcgcaagcatttgtacaagattataaaaagtctggatttaaaatgaatgatcgcaagcaaagtgtagacattatgacgcatcattttaaacaaagtcgtgacgttttaacacagtcagcggcatggacatcctatggtgatttaacaattaagccatccggctatcaagaaattacgacattggtaaaacaacatcatttgtttaatccacctgcatatgatgactttgttgaaccgtcattgtataaggaggcatcgcgttcatgacacgtcccacaaataacaaatttatattacctattatcacatttattattttcttaggcatttgggaaatggtcattattattgggcattaccaacctgtattgttacctggtcctgctcttgtaggaaaaagtatatggactttcattgttactggagaaattttccaacatttagcaattagtttatggagatttgtagcgggctttgttgtcgcattgttggttgctattccattgggcttcttgcttggaaggaatcgttggctatacaacgctatcgaaccgctatttcaattgattagaccgatatctccgatagcatgggcaccatttgttgttctatggtttggtattggtagtttgccagcgattgcgattatttttatcgctgcttttttcccaattgtgttcaatactattaaaggcgttagagacattgaacctcaatatttaaaaatagcggcaaatttaaatttaactgggtggtcattgtatcgcaatatattatttcccggggcatttaaacaaatcatggctgggatacatatggcggtaggaacaagttggatatttttagtttctggtgaaatgattggtgcacaatcgggattaggttttttaatcgttgatgcacgaaatatgttgaacttagaagatgttttagcagcaatattctttatcggattatttggttttattattgatcgattcattagttatattgagcagtttatacttagaagatttggtgaataaggagagatgatgatgactttagaaacgcttatcaaagaacaattagatcctcatttagtagaagttgatgaagggacgtattatccgagaacatttattcaacaattatttgtagatggttatttcggtgaggcggcattgagaaaaaatgctgaagtaatcgaagctgtatcgcagtcttgtttgacaacaggattttgtttatggtgccaattagctttttcaacgtatttagaaaatgccacgcagccacatttaaataatgacttacaacagcaattgttatctggagaaatattaggtgctaccggattgtctaatccgatgaagtcatttaatgatttagaaaagttgaaccttgaacacacttatgttgatggacaattggttgtcagtggacgtatgccagctgtaagtaatattcaagaagaccattattttggtgcgatttcgaaacatgaatcatcagatgaatttgtcatgttcattctacgtgccaatcaagatggtatcactctcgttgaaaaaacaaattttttaggggtcaacgggtcagcaacgtatcaaatcacattgaatcaagtcgtagtgccacaatcacaaatcatcacgcatgatgcgaagcagtttgcggcaactattcgcccgcaatttattgcttaccaaattccaataggattaggctcaattaaaagttctttagagttaattgatgcattttcaaatgtgcaaaacggaataaatcaatatttagagtatgatgttgaagcttttaaaaaacgttatcgtcaacttagagaagaatattatgcaatattagatgacggtaacttaacttcacatttaaatgaattaatatcattgaagaaggacatcggctatttattgctagatgtaaatcaagcttctgttgtcaatggtggttcaagagcgtacacaccatattcgccacaagttcgcaagttaaaagaaggattcttctttgcagcattgacaccaacattaagacatttaggtaaacttgaagcagagttgaaggggtaagtgtgataagctgattttttgtttagatgcgtttgttgaaacattttttaaaataatataaatcttagtttataaacattttctgttaatttgttatatccttttaactaggaaaatatacatttcgtaataataataatcgttatcattgaaaaagtgttaataaggtgtataatgaaaatgtgaacaattaatgaacttcttattttaaagaaggtgaatactatagatacgcatactaaagaacaacaattctcgaatctagtaagatcttatcgtaaagaatacgtgggtaaaggacccaatagtattcgagtgtcgtttaaagataattgggcgattgcacatatgacaggtgttttgagtaaagttgagagtttttacctaaacgacaaacgcaatgaatcgatgctccattatacacgcacagagaagattaaacagatgtataaagaaatagatgtaaatgagatggaaagtcttgtaggcgctaagtttgtaaaattatttacagatattgatttgaatgatgatgaagtcatttcaatatttgttttcgataagtcaatagaataagtgttgctggtgtaaggtacacggtgctgtttgctaacttcgctttgaatttaacaataattcaagggggtggtatgtcaaacggtgccgttttttttgtcatatttttaaaacaagcaacatgcaacacgtactttaaggaagtcaaaatttatcatttaggagagatggatatgaaaatcgtagcattatttccagaagcagtagaaggtcaagaaaatcaattacttaatactaaaaaagcattaggattaaaaacatttttagaggaaagaggacatgagttcattatattagcagataatggtgaagacttagataaacatttaccagatatggatgtgattattagtgcgccattttatcctgcatatatgactcgtgaacgtattgaaaaagcaccgaacttgaaattagcaattacagcaggtgtaggatctgaccatgtagatttagcggcagcaagtgaacacaatattggtgtcgttgaagttacaggaagtaatacagttagtgtggcagaacatgcggttatggatttattaatacttcttagaaactatgaagaaggtcatcgtcaatcagtagaaggtgaatggaacttgtctcaagtaggtaatcatgcgcatgaattacaacacaaaacaattggtatttttggatttggtcgaattggacaacttgttgctgaaagattagcgccatttaatgtaacattacaacactatgatccaatcaatcaacaagaccataaattgtctaaatttgtaagctttgatgaacttgtttcaacaagtgatgcgattacaattcatgcaccattaacaccagaaactgataacttatttgataaagatgttttaagtcgtatgaaaaaacacagttatttagtgaatactgaacgtggtaaaattgtaaatcgcgatgcgttagttgaagcgttagcatccgagcatttacaaggatatgctggtgatgtttggtatccacaacctgcacctgctgatcatccatggagaacaatgcctagaaatgctatgacagttcactattcaggtatgactttagaagcacaaaaacgtattgaagatggagttaaagatattttagagcgtttcttcaatcatgaacctttccaagataaagatattattgttgcaagtggtcgtattgctagtaaaagttatacagctaaatagaataaggatgctgggctagcgattaacgctttcaattttatataaatgaatcatataagcactactgctgttgtaaagatggcagtagtttttttatgattacatctaagtatagtcacggctatgttaggacaatgatttaacatttacgcacatatgtgttcacttacgcaattattgataaatttcattcatttggaataatatatagtcatatagtgctaattttttttgaggcattatatgcaagatgcattgtaaaatcgatgcatttgtttgttaaataactttgtataactaaaaattctttgtttcaacgtataatctaataatagattttatataaatggtagtgtgtatatatgtggataggggtgtagttattaatgaaacgcttaagtacgactttgaaagtacgattgattagcaattttttacagctaattattacgacagcatttatgccgtttatagcactatatttaacagatatgttaagtcaatcaattgtcggtatatatcttgttggtttagtggttctaaaatttccattgtccattatatctggttaccttattgagatatttccgaaaaagttgctagtacttatttatcaagcgacgatggtgataatgcttgtgttcatgggcatatttgggtcacatcaattgtggcaaattattggtttttgtgttgcatatgccatatttacaatcgtttggggattacaatttccagttatggacacattaattatggatgcaattaccgaagacgtggaacattatatttacaagattagctattggatgacgaacttatcggtagctattggggcattgttaggtggcttgatgtatggctacagtatgttactacttttcttaatagcagcttgtatatttttaattgtactctttattttatatatttggttacctcaagaccgaaatcaagtaaagcaaagtgatgacaagaggcatgcaagtcgttatcaaaaattacaaataatgaatatatttcgcagttataaattagttttgaaagaccgtaattatatgttattgatttcggggttcagtatcatcatgatgggtgaattttcaatctcctcatatattgctattagactaaaggatcagtttgaaacaataagtataggttcatatgatattacaggtgctaagatgttagcaatcttgctaatgattaatacggtcgtcgtcattttactcacgtattcaatctcgaaagttgtattgaaaatagattttaaaaaagctttaatcactggtttgctgatttatattgttggctatagtggtctaacctatcttaatcagtttggcttattagttgtttttatgataattgcgactgtaggtgagattatttattcgcctatagtttcagaacaacgctttaaaattattcctaaagctaaaagaggaacatatagtgcagttaatgcattaggtattcatttttcagaaacactagctaggttagggattgtgttgggtgttttcttaacgtcattacaaatgggactgtatatgtttatcgttttaacaattggtgctagcatgcttgttgctggtgtattcgggggacaaaaacaagtgaatacaaattgaatttatttaaatatttattttatgcatctttttatattgaaaacctattaatttggtcgtaattaaaatagagataaatttattaagaatttgttaaaatttaaggataacaattgttttatgcgagttgtttgtttaatataaacttgcttcatggatattttgtaacaacaatattgaatttgcaatgagatatgaacaacagaaagtgattaacgagttgtagtatgctatttatcgaagatgtatgtaatttacattgaaaaatataccaattgtaacgatgatacaagatgtattttagggtagaatatatcgctcatatgttgcgaatggtgttttatattaatcattacataacgagttaattaacatttcgtcggttatcatatcatcatgcaatttcagtaagtaatgagtattatgatatgaaagaaggactttttatgattatgggtaatttgagatttcaacaggaatattttcgtatatacaaaaataatacagaatcaacgacacaccgtaatgcgtattgggttaaactcgctaaaaatgttgaagctactaaaatgatgtatgcattatcgacaattgtacaacaacatgcatctataagacatttttttgatgttactaccgatgacaatttaacaatgatacttcatgaatttctgccttttattgagataaaacaagttccaacttcttccgcaaactatgatttagaagctttttttaagcaagaattaagtacttaccattttaatgattcacctttattcaaatttaaattgtttcagttcgctgatgctgcatatatactattagattttcatgtgtccattttcgatgatagtcaaattgatatttttcttgatgatttatgcaatgcatatcgtggcaatactgttattaacaatactcgacagcatgcacatttaaatagaaatgatgataaagacaatcaagatgcatcgcatatagcattagactcaaactattttcggttagagaataactctgacatccatattgatagttatttaccaattaagcatccatttgagcaagctttatatcaaacgtatttgattgatgatatgacatcaatagatatggcatcgttggctgttagtgtgtatttagctaatcatataatgagtcaacaacatgatgtcacattaggtatacatgtaccatcacatttaccaaatgatttacacggaaatattgtgccgttaacgttaacaatcgatgcaaaagatgtatgtcaacgttttacaacagattttaataaatgtgtgttgcaaaatatgtcgcaattacagtgcgcgaagtcttcgctttcactagagactatttttcattgttatcatcatatgatgtcttgttgtaatgatgttattgaggatgtacatcaaatacatgatgcacatacatctttagcggatattgaaatttttccacatcaacacgggttcaaaattatatataacagtgcagcatatgatttgctctcaatcgagacgctgagtgacttagttcgaaatatttatttgcaaattactgaagaaaatggaaataaacgaacaactgtagatgaacttaatttgatgacagaacgtgatattcaattatatgacgatatcaatttaagtttgcctgagatagatgatgcgcaaacagttgttaccttatttgagcaacaagttgaagcaacgccgaatcatgtcgctgtgcaatttgacggagtgtttataacatatcaaacattgaatgcacgcgcgaatgatttagcacaccgtttgagaaaccagtatggtgttgaacctaatgatcgtgtcgctgtcatagctgaaaaaagtattgagatgataatagcgatgataggtgtgttgaaagctggtggggcttacgtgccaattgatccgaactatccaagtgatcgtcaggagtacattttaaaagatgcaacgcctaaagttgtaataacgtaccaagctttatatgaaaatggtaaacaaaatattaatcacattgatttgaataagatagcgtggaaaaatattgataatctttctaaatgtaacacgttagaagatcatgcttatgttatttacacgtcggggacaactggtaaccctaaagggacactaattccgcaccgaggtattgttcgcttggttcatcaaaatcattatttaccattaaatgaagagacgacgattttgttatcaggaactatagcctttgatgctgcaacatttgaaatatatggtgcattgctcaatggtggaaaactgattgttgctaaaaaagaacaattattaaatccaatagcgttagaacaattgatcaatgaaaatgacgttaatactatgtggttaacctcctcattatttaatcagattgctagtgaacgaatagaagtattggtaccgttaaagtatttattaattggtggagaagtattgaatgctaagtgggtggatttgcttaatcaaaaaccgaagcatcctcaaattattaatggttatggaccaactgaaaatacaacatttacaacgacgtataatatacctaacaaagttccaaatcgtattcctattggtaaaccgattctgggtactcatgtttatatcatgcaaggcgagcgtcggtgtggcgttggtattcctggagaattatgtacaagtggctttgggttagctgcaggttatttaaatcagccagaattgacagcagataaatttatcaaagattcaaatataaatcagctgatgtatagaagtggtgatatcgttcgtttgttacccgatggcaacatagattatttatatcgaaaggacaaacaagttaagattcgagggtttaggattgagttgtcagagattgagcatgcgctcgagcgtatacaaggtattaataaagctgttgttattgttcaaaatcatgatcaagatcagtatatcgttgcttattatgaagcgatgcatacattatcacataataagattaaatcacaattacgtatgaccttaccggagtacatgataccagttaatttcatgcatattgagcaaattcctattactattaatgggaaattagataagaaggcattgccaatcatggactatgtcgatacggatgcctatgtagcaccgagtacagataccgaacacttgctatgccaaatttttgcagatattttacatgtgaatcaagtaggtattcatgataatttctttgaattaggtggccattcattaaaagcaacgttagtggtgaatcggatagaggcatctactgggaaacgattacaaattggtgatttattacaaaagccaactgtatttgaactagctcaagcaattgctaaggttcaagaacaaaactatgaagtgattccagaagctatagttaaagatgattatgtgctgagctctgcacaaaagcgtatgtatttattatggaaatcaaaccataaagatacggtgtataacataccttttttatggcggttatcatcagaacttaatgtagctcaattgcgacaagcagttcagcatttgatagcgcgacatgagattctacgaacacaatatattgttgtagatgatgaggttcgacaacgtattgtggcagatgttgtagctgactttgaagaagttaacacgcattttacggatgaacaagaaatcatgcgccaatttgtagcaccttttaatttggaaaagccaagtcaaattagagtgagatacattagaagtcccttacatgcatacctgtttatagatacacatcatatcattaatgacggtatgagtaatatacaattaatgaatgatcttaacgcactttatcaacataaattattgttaccacttaaattgcaatataaagactatagtgagtggatgtcgcatcgtgatatgacgaaacatagacaatattggttatctcaattcaaagatgaagtacctattttaagcttaccgacagactatgttagaccaaatattaaaacgacaaatggagcaatgatgtcatttacaatgaatcaacaaatgagacagctacttcaaaagtatgtagaaaagcatcaaattactgattttatgttctttatgagtgtggtcatgacgttgttaagcagatatgctcgaaaagatgatgttgttgtcggtagtgtgatgagtgcgcgtatgcataaaggcacggagcaaatgctaggcatgtttgctaatacgttggtatatagagggcaaccgtcacctgataaaatgtggacacagtttttacaagaggttaaggaaatgagtttggaggcatacgagcatcaagaatacccattcgaatgtttagtaaatgacttagatcaatcacatgatgcctcacggaatccattatttgatgtcatgttagtactacaaaacaatgaaacgaatcatgctcattttgggcatagtaaattaacacacattcaacccaaatcggtgacggcgaaatttgatttatctttcatcattgaagaagatcgcgatgactatacaatcaatatcgagtataataccgatttatatcactcagaaacagttcgtcacatgggtaatcaatgtatgattatgattgattatattttgaagcatcaagatacactacaaatttgtgatataccaaacggcacggaggaacttctaaattgggtcaatacgcatgttaacgatcgaatgcttaatgtcctgggaaataaatctatcataagttactttaatgaagttgtctcacgacaaggtaatcatgttgcgctagtcatgaatgatttgacaatgacgtatgaaacattacgtaactatgtggatgccattgcgcacatgctcctatcaaatggtgtgggcaatggtcaacgggttgccttgtttacagaacgtagttttgaaatgattgcggcgatgttggcgacagttaaagtaggtgcatcttatatacctatcgatattgattttccgaaaaagcgacaaggtgcaattttggaggatgctaaagtaactgcagtcatgtcttacggcgttgaaattgaaacgacattaccagtcattcaattggaaaatgctaaaggctttgttgaatcaaaggaaaatgaacaatatgatgatttacatggcgatcaacttgaaaacacagcgatgttagataatgagatgtatgctatttacacatctggtacgaccgggatgcctaaaggggttgccatacgacaacgaaatttgttgaatttagtgcatgcatggtcaactgaattgcaattaggcgacaatgaagtatttttgcaacatgcaaatattgtttttgatgcatcagttatggagatttattgttgtttgttaaatggtcatacgcttgtgattccagatagagaggaacgtgttaatccagcacagttacaacaactcattaataagcatcgtgtgacggtggcgtcgattccgttacagatgtgtagtgttatggaagacttttatattgaaaagttgattacaggcggggcaactagtacggcatcctttgttaaatatattgagaagcattgtggcacgtatttcaatgcctatggaccatctgagtcaacagtcatcacatcgtattggtcacatcattgtggtgatttgatacctgagacgattccaattggcaaacccttatctaacatccaagtgtatattatgtcagatggtttgttatgcggtattggtatgccaggcgagttgtgtattgcaggtgatagtttagcgataggatatattaaccgtccagaattaatggctgataaatggcaaaataatccatttggtaaaggaaagttgtatcatagtggtgatttagcacgttatacatctgatggtcaaattgaatttttaggaagaatagataaacaagtgaaagttaacgggtaccgtattgaacttgatgaaattgaaaatgcaatattagctattcgtggtatatctgattgtgttgtaacagtaagtcactttgatacgcatgatatattgaatgcttattatgtcggagagcaacaaatggagcaggatttgaagcaatatttaaatgatcatctgcctaagtatatgattcctaagactataacgcatatcgattgtatgccattaaccacgaatgacaaggtggatactacgcgtttgccaaatccatcacctatacaacagtctaataaagtgtatagcgaaccatctaatgaaattgagcagacatttgttgatgtatttggagaggtattgaaacaaaatgatgtcggtgttgacgatgatttctttgaacttggtggtaactcattagaggcgatgttagttgtctcgcatttaaaacgatttggccatcatatttcaatgcagacattataccaatataaaaccgtgcgacagattgttaattatatgcaccaaaatcaacaatcattagttgcattaccggataatctttcggaattacaaaagattgttatgtctcgttataatttgggtgttttagaggatagtctaagtcatcgacctctaggaaatacactattgactggcgctacagggtttttaggtgcttatctgattgaagcactacaaggatacagtcatcgcatttattgtttcatacgtgctgataatgaggaaatagcatggtataagttgatgacgaatttaaatgattatttttcagaagagacggttgaaatgatgttatcaaacattgaagtcattgttggtgattttgagtgtatggatgatgttgttttaccagaaaacatggatacgattattcatgcaggtgctcgtacagatcactttggtgatgatgatgaatttgaaaaagtaaatgttcaaggtactgttgatgtcatacgtttggcacaacaacatcatgcaaggttaatatatgtgtctacgataagtgtgggaacttattttgatatagacacagaagatgtgacattttcagaagcggatgtctataaagggcaactactaacatcaccatatacacggagcaaattttatagtgaattaaaagtattagaagctgtaaataatggcttagatggtcggattgtacgtgttggtaatttgacgagtccttacaatggaagatggcatatgagaaatataaagactaaccgtttttcaatggtaatgaatgatttgttacaactggattgtatcggggttagcatggctgaaatgcctgtagatttttcttttgtggatacgactgcaagacaaattgtcgcattagcacaagtcaacacaccacaaatcatttaccatgtgctatcacctaataaaatgccggtgaaatctttgttagaatgcgttaagcgcaaagaaattgaactcgtcagcgatgaatcatttaatgaaattttacagaaacaagacatgtacgaaacgattggattaactagtgttgaccgtgaacaacaactagcaatgatagatacaacattaacattaaaaataatgaatcacatcagtgaaaaatggccaacgataactaacaattggctgtatcattgggcacaatatatcaaaacaatattcaataagtaagtagggaaagttatgacagtatttgtaatgcaattacagagtaacttgaaaagtattgaagaattaatatcacaaagtcgttggtcatataaaaaaccgcgtacagtcaactatagatacaatcaagataaactcatgcacagattgggagatattttagtgcaatatggaattcaacatgacacaggtttattaccacatgaatggcattatcacatttcgccacgaggtaaggcagatattgttcaacacaatcgtgatggacagcccatctatgtgagcttatcatatagttatccttatatcgtgtgtgttgtcgataaagaaccagttggtatagatatcgaaaagatatcacaacgtttagactggcgtacgttagtgacgtgtttctctacaaacgaagcacatcaaatatgtagtttaaatgatttttatcaaatatggacacaaaaagaaagttttacaaaattgattggtgaaggtttaatcaaaggattggacatttatgatatgacacaatcacacttttatcaatcacgtgaagtgaagttcaaacaatttatttttgatcagtttatggtacaggtatgtttcttaggacaggcaccctggggttataaaaaagtgtctgtatttcagttattgagtagttaatatgacgtctgacagtatcattgcgcagtgattttaaactatactgcctaaatgtttactgttagatgtttttttattggaaaaatgaaaggtgaatacacgatggcatcattcaaaatcatgacgagattaaagtaagtgataaggtgaaaatatactgagcaatattgaaattaccgaaaataatagtttgttacgacgcatttgagactttaatgctcacgtaagttggctggaatcatatcatgtcagttaataaaataacgtgagcatcaatcatcatactcaaacgatgatttaaaactcacgttaatgttagtcagtgtattaatttaatttatagcgatagacaaaatgttgtcgcactaattcaattgtcatcatccagacgatatggccaaagaattctgacagatgctcttggaatggttgatcccacacagcaggtacagtatgcatgattggcataatgataaggtggaataatacccaaatagcaataccaaaaacagcaccttgtcccattgctaagtaagcgtattttttaactaatatgcagtaaataattgcaatgacgatagaaaaactaaagtgaacaatgaagcttacccaaggtaattccatatttgaaaatgtatacgtctgatgtgtaaattcactactaaatcctaattgttgcaataactcttgaggtgggttcgttgcattacgttctggtgtgcgaggtggaaacatgacttcccaacctaattttacaattccagataacaagccaccgataattccagcataaatgaatatacccatttgtcgtttcgtcaacttaaggactcctctctatttactatcctcattatagtattttgtgaaaataatcacaataaaaagctttgcaaaacttaaaatattttgatgaacaaatttgtaaaaggttattagttttttacatctcatattgtatcgtactgtattcaaaattgttaacgagatgaacggtaaataaatgttttagcgcaatggataatcgaactggaatcatcgcgtgtcaaaacttgttaggccttaatttcatagttatgaattaaggattgttgtgccaacaaaatcattattgtaaatagattcaatgatatttggcttgtttcctgatgcaatgataactttaggacagccattttcaatcgcatttttggcatctagcactttgggaatcatacctccataaatatcaccatgttcaatatattgatgaatatcgactaatggcaattgaggtataaccacatcattgatgagtacacctgcaatattacttaatacataaataggcgcttttaatgatgatgcaataaaataggcaagcgtgtcagcattaatattgtaaaattctccatcatggttattgaaaccaatcgaattgatgataggtacaaatttagtacataaatactgtaaagcatccttatttaaagcggtcggaacaccgacatatccatattgttgatcaaaagatgtaatttcaaacagctgtgcatccaaaccacataagcctattgcagaacattggtgctggttaaattgagctactaatgcagtgttaacgtctgcaatgagcgtgtgtttagtaatggtcatggttgctttatcagtcactcttaggccattaacaaagtgtggctcgatttgctggtttgataatgcttcattaataaatgggccaccgccatgaacgataatggggtagatgttgtttgatcgtaaatgcttaatgttgttaataattgatggatgcatgtcactaagtgtactgccaccaattttaatgacaataaatttcatctaaccaacaccaccttatgttcgatatgatgcgttgatacgcacataatcataggataaatcacaaccgtatgcagtcgctgcagcgttacctaaaccaagctgaacgtcaattgtgacattttcatgagttaatgtattcgacatagcttgctcatcaaatagtacagccatacctttatcaacgacaggtatttggttcagttgaacatatgtgcagttaggatcaatttcacatccgctgtagccaatagctgtaatgattcgaccaaaattggcatcttcgccaaaaatagctgattttactagatttgaacttacgatagttttaccgatttttcttgcatctgatattgatttagcgcctgacacattgacgctgattaactttgttgcgccttcgccatctctggctatagctttagctaaaaatgtacagacaaaattgaatgcatcaacaaatgtttcccattgtggatggtcttgactaagtatttggtgttcaacttggtgatttgccatgactaataccatgtcatttgtacttgtatcgccatcaacagtaatcatattaaatgtatggtcagtcgaagattttaataattgatgaagtgtattcgattcaatcgatgcatcggttgttataaaagcaagcatggtagccatatttgggtgaatcatacctgaacctttggcgctaccaccaattgtaacggttttaccatcgatttttagtgatacagcgatatgttttgtacaggtatcagttgttaaaattgcctcgttaaacgcacctggcgttgcaaaattagcatccttaatatgttcggtcccagtcttaattttatccataggcaaatattcaccaatgaccccagttgaagcaacagcaacatgctcagatggtatttgaagttgttgagcaacccatgtttgtgtttgtcgtgcatcatctatgccttgttgaccggtacaagaatttgcattagctgaattaacaacaagtgcttgtaattttcctttagacttttgtaaagtgtcttcagtgacaataagtggtgcagctttaaactgatttaaagtatatacggcagctgcacttgccaaagacgatgagtaaatccacccaaagtcttttttgttagcgcgtaaaccgatgtgcataccaccagccgtgaagccttgaggtgtactgatatcgccatgtttaataattgaaaagttatattgttgtgatgtcgtttcttgatgtttcattctaacaccccttatggataaactggtgattgatttaggccagtcgtcacttcaaaatcatataatatatttaaattttgaatggcttgcccacttgcgcctttgacaaggttatcaatcactgatactaaaattgctgtttgcgttgtttcatctacatagatgccgatatcgcagtagttactaccgagtacttcttttgtggttggaaaagtcccaatatctctaattctgacaaatggctgattagcataataagaggtcattaatttatgtaatgattcagtcgtatattcagatgataatttgacatatattgttgataaaatacctcgtgtcattggtacgagatgtggtgtaaatatgactgatacatcttgacccgcaatgatagataaatattgctcgatttccggtttgtgtttatggtttccgattgcataagcgcttagattttcattcatttctgaaaaatgaacacgttgtgataatgaacgaccagcacctgacacgccggtcttagcatcaataataatagatgacaaatctactattttttcgctaataagtggatgtaatgctaataatgttgctgtagggaaacagccaggattagaaatgagcttcgttccattgttatcaaacgattgccattctgaaatgctgtaaatagcatgattcaaatcatcttgtgctgcagcagtttctttgtaatatgcttcatatatttcacgattcttaattctaaatgcgccagataaatcgataacatgaatacctttttctactaagggagggatacatgttttacttacgggtgctggtgtcgcaaagaaaattacatcacagtcattattgtccactgtaagtgcttcgaaatgttgcataatatgttgtaaatgtggaaatgttaatttcaacggttcatctacttttgaatgtgagtagatgtgtgcaatcgttacatgaggatgtgtttgtaacaatcgaattaattcaattgcgccataaccgctaccgccaacgatacctactttaatcatcatgaatccctcctatgtcatatataaatgattaattgttaatttttaaaaacgtcttgaaaagctgcaacaatttgatggatttcctctttatcaatgactagaggtggagacaatcgaatgatagtacgatgcgtgtctttgcataagattccacgttgaatcagttgatccacaaaaggtgcagcatctgtgttaagctctatgcctataaataaaccacgacctctaatttctttaatactaggatgtttaagttgtagcaacgcttttaataaaaatgaacctaagcgttctgatcgttcaaccagttgttcatctttaagtacatcaagcgctgccgtcgatattgcaatggctaaagggttaccaccaaatgttgaaccatgtgtacctggtgttagaacacgcatgacatcattatttgcaagtacagcagatacagggtataagccgccacccaatgccttacctaaaatataaatgtctggaacgacttgctcccattccatagcaaaccatttcccagttctaccaagaccaacttgaatttcatctgcaatcaataatatttgatgtttatcacatagttgacgcacagcttgaatatatcctttcggtggtatattaacgccaccttcaccttgaattggttccaaaataattgctgctgtattcggtgaaatagcttgtgttaattgttcaatgtctccaaaatctactgttgtagtgccttgaagtagggggtgaaatcctgctttatatgcgtcgtggttagatagtgataatgagccaagtgtacgaccgtgaaaattgttattcatagcgatgatttcaacttgtccgtcagtaatgtctttaacttcagagccccattttctagcaattttaatggctgcttcaacagcttcagtaccagagttaagggggagtactttgtctttcttagcaagatgacaaattttttcttcccatttcccgagattgtcactataaaggacacgtgaaatgatagacaactttgaagcttgttctgtcatcgctttaacaattgttggatgacaatggccttggtttgcaactgaaaaacccgaaatgcaatctatatattgtttgccatcagtatcccaaactttgacacctttacctttagaaatgacaagcttaagtggtgcataattattagagctataataatcagttaattcaatgattgaattcatcggtctccctcctttatatttatacattttaaagaattaatattaatatattacagttgttcaatataagtgtcaaatgtaaatttaataatataaagataaggttgtgtttgtattaatgtgatttgtaaaatgaaagtactaatattttttgtggataatcattgatatgtatgtatacgattgcagtttaatgtagtatgaataaaaaatgccacaagcatatgtttaacatatgactgtggcatagtattatgcttgtggaattttacgatgcttaattttataaataatgaagccgataatgaaaccaatcaaactgagaacaacccagcccataccaatgtctgataatggtaaatatttttggctgaaattaatcaaagtttgtgagaatgatgtgcttgaaatgaactctgggctagcttttaatccgtctattaatgcggcaatcattgtaaagaaaatggtacattgatacacaatcttggaatgatggaatttgctactaaataatgttagtacaatcaaggcaattgctaatggatataagaacattaacactgggactgagtacataataattttagttaagccaacattcgcgaataagaacgaaataaagctcacaactgttgcaatcgctaggtaattcagtttcgggaataaatgctcaaatgtttctgaaaatgccgtaattaaaccgatggctgtttttaaacaagcaaccataacgataagtgacaacaggacgataccgtagttacctaagtagtattgcgtaatttgcgctaaggcaataccaccattttcactaagtttgaaatgaccaatacttaatgtacccatgattgctagtagggtataaataatccccatcataatgatactgatagtaccagacttaattgtttctttagcgatatcagttggattttcgatacctaactttttaatcgttgcaacaatgatgataccaaatgccaatgacgctagcgcatctaaggtattgtatccatctaaaaagccgttaaataaggcatgtgattgatattgtttactaataggtgcatcagatatgccacctaatggatggataaaagcaaataataaaataattgctaataatactaagaataccggatttaaaaatttaccgatatattctaaaattcttgatggctttctcgcaaaaaaccatgcaatcacaaagaagacgaagctaaaaataaataaatataaagtgatttgctttggtgataaaaatggcgaaaatgcaatttcaaatgatgtcgttgccagtctaggtaaggcgaaaaatggtccgataactagatataaggcaatcgtgaaaatgtaagcatatgttttattaacacgcgatgcaatttcaaataaaccagatgtctttgaaatgccaatagcaatgatacctagaaatggtaagccaattgctgtaattaaaaatcctaagttagcgataaaaacgttagaaccagcagcttgacccaagtgtattgggaagataagattgccggcaccaaagaataaaccaaataacatagaacctataaacatgttttctttaaatgttagtttcttcttcatatatgtatttgttctcctttttagaacttataaaaatctacttaattaagataatatcaaaaattaaacataaagtgatacataattttgcaataaatactaaattttttgaaaattccggaatgaatactgttttttatgtagtaggggcgtaagttaagaacgatttaacagatataggctaagtttatagataggaggttagacaacccgacgtattaatactttgtaaaataaagatacccccttcaacatgatcgaagggggtaagtgtatgcttagttcaatatatttagtaattcgcttgtggttactgtttgccccattatagggaataaattatctattgggaattgatgtagcgtttcgttttgagcgctcatcatgtcagtaacaaaatactgatcgtagtttaattgataggcgtctcgtgctgtcgtatctacaccaatatgcgttgcgacaccaccaagaacaatcgtatcaattcctcgacgtcgcaattgtaagtccaaatctgttcctacaaatgcactaaaatgtcgtttgtctatgacaaaatcgtcatctctcgtgtctaataaatgatggaaacgactgtagtcgtcgccttcttttggtggtaatgagatcattgcatttggttgcaatacatctttaccatcatagaaattcacgcgaacaaaagcgataaagccattgttttttctaaaaacatctattaatttattagcgttttgaacgacattttcagctgtatgtggcgcataatccatcttaagtataccttcttgcaggtcgattaacactaaagcggttttattaaaattaatcatcttatatcagagtccttttcgtttaataaagtattcgcttaaacttataccctgtatacgatgaaattatttattttgttgtgaaaaagctttagcgatatcgatcagtttcttcggtgcgtcttcgacagacattttgacttcgacaaaatgcatcacatcgggatgaccattaattgcattaaacgtgtcttgtaaatcttttgatgattcaacgtcatgaatttcaacatttttaccaccaaatacagctggtaaagctttataatcccacatgtgaatttcattataaggttcatacatgccgtgaataagtcgttctaccgtatagccgtcattattaatcacaaataataccggtttaatatgctgtctaatcatagttgaaatagcttgaacagttagttgcaatgagccatcaccaattaataataagttacgacgatctttgtctgctaattgtgaacctaatgttgcaggtaatgtatagccgatagaaccccataacggttgccctataaaagtattgtttttgtataatgctaaatcataagcaccaaagaatgatgtaccttgatcagcaataatgacatcatttggttttaagaaattttgcatcattttaaaataagtttgttgtgttaatggttctgtgccaacagtataatcgggtgatgttggacgatgatacgcagggaacgttgcactgttcgtatatgaaatattggataactgttttaacaacgatggtagagatatttcatcatttgtaacatcatcaattttgatattgtgatgatttaacataacgacatcatcgatattgaattggtatgaaaatcctgctgttgctgaatctgttaatttggctccaatatttaaaattaaatcgctgttgtccacataatctcgtattttatcttcggcaattttcccatcgtaaatacccatataatatggattttcctcattaaaagcaccttttcctaatgaaagttgtgctactggtatctgtgtttgatttacaaaatcttctaattcttgatgaaggtgaaaactgttaatttcatgtccagtaatgatgataggctgcttcgattgatgcaatttagatgttaataactctatatatgttgatgcatccgtatctttggctgccgttacttcaaatggtgtcggtatctcaatttcagagattgcgacatcgattggtaaatgtaaatgaactgggcgtctttcggcgattgctgtattaattaaacgtggtatttcggttgttgcattttcaggtgtgatataaccttgtgcaacggttatatgtgcaaacatttttcggtagtcgtcaaatgtaccttcaccaagtgagtgatgtacatatttaccggcatgttcaacagcacgtgtcggcgcacctgtaatcgcaatgacaggtatgcgttcagcatatgaacctgcgataccgttgacggcacttaattcgccaacaccaaatgtagtaactaatgcagcgagtccattaagacgggcataaccgtccgctgcgtaacttgcgtttaattcatttgtatttcctacccaatctacattgggattgctgataatatcgtctagaaaagcgagattaaaatcaccaggaacaccaaaaattttatcgacgcctgctcgatgaatagcgtcaattaagtaagctccaatgcgttgtttcataaaaaaaccaccttttctctatatttacacttaaaatgatagcctcgaatatagtgtaaggtcaaggaagttgactttgttgtgaaaacgctaacaatagtgaacaattaatattttttaggaaatgagtatgaaggggggctttaattgatgatcttaaaattcaaaatttaaggggagagcgaactatcaatgatgctgcaaaatacaatagcaaagaaaaaacaggcgcgtcaccttatgaaggtatacgcacctgtttatagtaagcattatttagcttcaaataattgatcgccaaatgaaatgttgccatgttcaccttgtttaaaatcaaggtttgtaatgtttccttgtgtcacgataataggcgtaatatcactctttgcatgattgcggatgtagtctaaatcaaagttgattaataaatcaccttgtttaacttcttgaccttcctcaacatgtaaagtaaagccttctccgtttaatttaacagtgtctaaaccgatgtggattaatagttctaaaccactatctgatacaagaccaattgcatgttttgttgggaaaatcatttgtactttaccgttgaatggtgcacgaacttcaccttgtgaaggtttaatagcgataccgtcacccatcattttttcgctgaacacttgatcaggcacttctgataatggtgttacttcaccagttaatggtgcatgcacgatatggctcaattcgctagttgcagatttatcttctgcaacaacaacagtttcgtctttatcgtcttccatagtagtagggttttctactacttgaccattcataatctgttgcatttcatgtttgatttggtcagattttggaccaaaaatcgcttgcatattattgccgacttctaatacaccggatgcacctaaatctttcaaaccaggaacatcaactttagatttgtcgttaacttcaacacgtagacgtgtgatacaagcgtctaaatgtttaatgtttgctttaccacccatagcttctaatactgcatatggtaattcagttgctgaagcagtagccgcttgtgattgtttatcttcacgacctggtgttttgtattttaattttacaattaagaatcggaatacgaagtagtaaataactgcgtatacaagacctacaggaataactaaccaccattgtgtcttattaggtagtataccgagtaagaagtagtcgatgaaaccacctgagaatgtataacctagatgaagatctaataagtacaatgttaagaatgataaaccatcaagtactgcgtgaataaagaataataatggtgctacaaataagaatgagaattctaatggttctgtaataccagttaagaatgatgttaaagcagcagaacccattaaacctgctactactttcttattttcaggtttagctgtgtgataaattgctaaagctgctgcaggtaaaccgaacatcataacagggaattcaccttgcatgaatttaccagctgtcaaatgtgcgccttcacgaatttgttcgataaagatacgttggtcaccgtgaataatttcaccagctgcatttttccatgaaccaaactcgaaccagaacggtgcgtggaaaatgtgatgtagaccgaatggaattaataaacgcttgatgaaaccaaataagaatacggcaacaccagtatttgaatctaataatcctgtactgaatgcatttaatcctgattgaatcgttggccaaattaatgccattgggaatgctaaaataaatgatgttgtagccatcataataggtacgaaacgcttaccagcgaagaaacctaaataagatggtaagttaatgttatagaacttgttataacaccaagctgccagggccccgattataataccgccgaacacacctgtttgtaatgttgggatacctaaaatgctagcgtaaccactcgctggatcaccaatattcttaggtgtaacttgtaaaaagtcgcccattgttttgttcatgattatgtaaccgacgaatgctgcgatagctgctacgccatcaccgccagctaatccgattgcgacacctaatgcgaaaatcataggcaagttatcaaaaatgataccaccagcacctgtcattaatttagcgacagtttgtacgccaccattttgtataaacggcaagtagtgttgtaatgattcaccttgcatagctgtaccgatagctaataacagaccagctgctggtaaaatcgcaacaggtaacattagcgctttaccaatacgttgcaattgaccgaaaagtttcttcctcacttgtccaacctccaaagttgtatgtaatatttaagattcaataaaaaagacacgagcaaatagactgtgttggtaaccatcacagcttaatttaactcatgcctaatcttacttagtaacacgttggtgtatgtaattaatgtaaaagaagcaattgactaagtagtatataaaactgatacgttagtttatctagcttaccatcacatcttattgaatcttatttgtttgcgactcctattttagcatggtgaagtatgcgttttcaatacaattattaaattcaatttcaaatctcttaaatgttcacagattattattaaaacataatataagataatcctgaataaaatgtataaaagttgttgtaataatccagcagtagcagctattatcagcacttaaaagaaaggataatctttgatggtgtaataattaacttgtgacagaaatatgtaagattattacaatgaacaggctttaactgattaatattgtaatgtgttttctcttatagtaaaatgtaagcgattacacaactcaactatattttcctaataattatattgttaaggagggctactttgacaggcttttcagtgtatttaggacaacctttagatgaagcgtatattaagcgaatgattaaacaaggttaccaaatgatttttacatctgtacaaataccagaagaagatgacgagacaaaatatcattatttcacaaaactactcaatttattgaaacatgaacaagtgacttacctcatagatgctaatccatctattttaacaccatctttttatgagcatcttcgacaatatgatgcacaatttatgattcgtatcgatcatagtacatcaattgaggcaatcgaagcgataatggcacagggtttaaagtgctgtttgaatgcaagtattatttcccgggaattgttaacaagcttacatcaacaattgaatgattttacattactttcattttgtcataactattatccaagaccagatacgggattatctgttgacttggtcaataagaaaaatgaactcatttatcaatttaatccaaaggcacaaatatatggttttattgtagggagtggtttgcgaggtcctttgcataaaggcttgccaacaattgaagcaacgagacatagtcatcctgtcgttgcagctaaattattacaagaaactggtgtatctgaagtgttagttggagactcattgattgaaatgaggcaggcaaaacaacttatagatttttgcaagcataggcatttcacgttatgtattgaagaagtgtttgatacgacagtgacttaccttttcgatatgtgtcataaagtacgcccggataatccggaaaatgtcattcgttcggaaacgtcaagacaaatatgtccacattcgattcaaccacagtttacgacgcaacgacgcattggttcagtaaccgttgataatttgaataacggacgttatcaaggcgaaatgcaaattgtgagacaaacgcttagtgcacatgacaatgtgaatgttgttgcacaaattattaaagaagacttaccactgttaagttgtatcgagccgaatgatacatttgattttcaaaaaactagggagtgtaagaagtgatggaaaatagtacgaccgaagcgcgtaatgaagcgacgatgcatcttgatgaaatgactgtggaagaggctttaattacgatgaataaagaagatcagcaagtcccgttagcagttcgaaaggcaataccacaattgacaaaagtaattaaaaaaacaattgcacagtataaaaagggtggacgattgatctatatcggtgcaggtacaagtggaagattgggtgtcttagatgcagcggagtgtgtacctacattcaatactgaccctcatgaaattataggtattattgctggtggacaacatgctatgacgatggctgtagaaggtgcggaagatcacaaaaaattagcggaagaagatttgaaaaatatagatttaacatcaaaagatgtcgttataggaattgccgcgagtggcaaaacgccatatgttataggcggtttaacatttgctaacacaatcggtgctacaacagtatctatttcatgcaatgaacatgcagttataagtgaaattgcgcagtatccagtagaagttaaagttggtccagaagtattaactggttcaacacgtttaaagtctggtacagcacaaaagttaattttaaatatgatttcaaccatcacaatggttggtgtcggaaaagtttacgataacctcatgattgatgttaaagcaaccaatcaaaaactgatcgaccgttcagtgcgtattattcaagaaatatgtgctatcacatatgatgaagcaatggtgttatatcaggtgtctgagcatgatgtgaaagttgcgacagttatgggtatgtgtggcatttctaaggaagaagcaacaagacggttattaaacaatggtgacattgttaaacgagcaatcagagatagacaaccttaggagggatttaaatgaccaaagaacaacaacttgcagaacgaattattgctgcagtaggtggtatggataatatagatagtgtcatgaactgtatgacacgtgtgcgtattaaagtattagatgaaaataaagtagatgaccaagaactaaggcatattgatggtgtcatgggtgttatacacgatgaacgcattcaagttgtggttggacctggtacagtcaataaagtggctaatcatatggcggaattaagtggtgttaaactaggtgacccaataccacacaatcacaatgatagtgaaaaaatggactataaatcatatgcagctgataaagcaaaggcgaataaggaagcgcataaagcaaaacaaaagaatggtaagttgaataaagtattgaaatcaattgccaatatctttataccgttgattcctgcatttattggagctggattaattggtggtattgcagcagtactgagtaacttaatggtggcaggctatatttcaggtgcttggattacgcaacttataacagtattcaatgtcattaaagacggtatgttagcatacttagctattttcactggtattaatgcggctaaagaatttggtgcgacaccaggacttggtggcgtgattggtggtacaacgttattaacgggtattgctggtaaaaatattttaatgaatgtcttcactggagaaccattgcaacctggacaaggtgggattattggcgttatttttgccgtttggattttaagtattgtcgaaaagagattacataaaattgtgccaaatgcgattgatattattgtaacgccgactattgcattgttgattgtaggactattaactatctttatctttatgccattagcaggttttgtttcagacagtttagtttcagtagttaacggaattattagtattggtggcgtatttagtggatttatcattggtgcaagcttcctaccgttagttatgttagggcttcatcatatttttacgccaattcatatagaaatgattaaccaatcaggtgctacttacttattgccaattgcagcgatggctggtgctggacaagtaggtgccgcattagcactttgggtaagatgtaaacgcaacacaacattacgtaatactttaaaaggtgcattgccagttggtttcctaggtatcggagaaccattaatctatggtgtgactttgccattaggtcgacctttcttaactgcttgtattggtggtggtattggtggcgctgtaataggtggaattggacatattggtgccaaagcaataggcccaagtggtgtgtcactattaccattaatctcagataatatgtatttaggttatattgcaggattacttgctgcgtatgctggtggattcgtttgtacatatttatttggaacgacaaaggcgatgcgacagacagatttgttgggtgattaatgatgacaaatattttatatcgcattgataagcagttgagtgattttacgaagacagaaaagataatcgctgattacattttaaagaatccacataaaatcattgatatgactgtgaatgatttggcagatgttacgaatgttagtacagcatcaattgttagatttagtcggaaaatgacacatcaaggttttcaagagctaaagattgcgatatctcgatacttacccgaagatattgcaaccaatccacatttagaattgattgaaaatgaatctgtagaaactttgaaaaataaaatgattgctagagcaacgaatacgatgcgatttgtagctactaatattatggatgcgcaaattgatgcaatttgtgatgtgttgaaaaatgccaggacaatatttttatttggatttggcgcatcgagtttgactattggtgatctttttcaaaagttatctcgtattggcttaaatgtcaggttattacatgaaacgcatttacttgtgtcaacatttgcgacgcatgatgatagagattgcatgatttttgtgacgaatcaaggtagtcatagtgaattgcagtcaattgcacaggtggccacacattacagtattcccatcataactatatctagtacagctaataatccagtggctcaaattgcagactatgcattgatttatggcagaactgatgaaaatgaaatgcgtatggcggctacaacgtcactatttgcacagttattcacggtagatatattgtactatcgatttgtagcattaaattatcatgcgattctagattgtataacccaatcgaaaatggcacttgataattacaggaagcatcttgcgacgatagattttaaacattagattaatataaagttagttgcaacgtaaacaattgaagtttttgatgtgattcagttgcttgatgaaaaattgttgctacaagtttgtaaaactggcatagaggctattttgaaaatgataaaggcgtgacaaattaaagcaaagttcagatttgagctttgcttttttcatagatggaaattaaatgctgaagaataattttaatgctaaatgaactaatacgaaggtgctaaaagcaattattatcaaattagtgatatgaatgaaatgtttaaatcgtttgcgttgattgtattcgggacttttatagagtaggtagtagtacataaagagtatggctgcgaacatgccgaatattgaagtgaagttacctacagtgactgccatgtaatgatttaaagttaaatagtaacttagactaataataaaaaataaaatgatttgataggtaattaacaccattcaagtccctccattaatcgtagacaaaaaatttatcaatgatttgattatttgtattcaaattttagtatacgacttacctcaaagacaaatattaaaagataagacaataaaattagaataaatttacgtttgaagataaaaaacaaacatttttcattaaagtttatgatatatttagagcaatagaaagtgtatggaaggggatatgaatggcataccaaagtgaatacgcattagaaaatgaaatgatgaatcaacttgaacaattgggttacgaaagagtaacaatacgtgataataagcaattgcttgataattttagaacgattttaaatgagcgtcatgcggacaaattagaaggcaatcccttaacagataaagaatttcaacgtctgttaacgatgattgatgggaaaagtattttcgagagtgcccgtattttacgtgataaattaccacttagacgtgatgatgagtctgagatttatttgtcgtttttagatacgaaaagttggtgtaaaaataagtttcaagtgacgaatcaagtatctgtcgaggatacatataaagcacgttatgatgtaacgatattaatcaacggactaccccttgtccaagttgaattgaaacgtcgaggtattgatattaatgaggcgtttaaccaagtaaaacgttaccgtaaacaaaattacacaggcttattccgctacatacaaatgtttatcattagtaatggtgttgaaacgcgatacttttctaataatgatagcgaactattgaagagtcacatgttttattggagtgataaacagaataaccgtatcaatacattgcaatcgtttgctgagtcatttatgagaccttgtcaattagctaagatgatatcgcgctatatgattattaatgaaacagatagaatactgatggcaatgcgtccgtatcaagtgtatgcggtagaagcacttattcaacaagcgactgagacagggaataatggatatgtatggcatacaactggaagtggtaagacgttgacttcttttaaagcgagtcagattttatcacagcaagatgacattaagaaagttatctttttggttgaccgtaaagacttggatagtcaaacagaagaggaatttaataaatttgctaagggtgctgtagacaaaacttttaatacctcgcaactggtacgccaactaaatgataaaagtttgccacttattgtaacgacgattcaaaaaatggctaaagcgattcaaggtaatgcccatttattagaacagtataaaacgaataaagttgtatttattattgatgagtgtcatcgcagtcaatttggtgacatgcatcgtctagttaaacaacatttcaaaaatgcccaatactttggattcactggtacgccacgttttccagaaaatagtagtcaagatggtagaacaactgcagatattttcggtagatgcttacatacgtatttaattagagatgccattcatgatggtaatgtacttggtttctcagttgactatattaatacttttaaaaataaagctttaaaagcagaagataacagcatggttgaagcaattgatacggaagaagtatggttagcggataaacgtgtggaattagtaacacgacatatcatcaataatcatgataaatatacacgtaatcgtcaatattcaagtatatttacagtccaaagtattcacgcgcttattaaatattatgagacatttaagcgacttaacaaaaagttggaacaaccgttaacgatagctggtatatttacgtttaaacctaatgaagatgatcgtgatggtgaagtgccatatcattcacgtgaaaaattagagataatgattagtgattataataaaaagttcgagacgaatttttcaacagacacaactaatgagtattttaatcatatttcaaaaaacgttaaaaagggcgttaaagatagtaaaattgatatcttaatcgttgttaatatgttcttaactggttttgatagtaaagtactgaacactttatatgttgataagaatttaatgtatcatgatttaattcaagcgtattcacgtacaaatagggttgaaaaagaatcaaagccatttggtaaaattgtaaactatcgtgacttgaaaaaagagacagacgatgcactgagagtattctcacaaacaaatgatacggatacaattttaatgcgcagttatgaagagtataaaaaagaatttatggacgcttatcgtgagcttaaaatgattgtgccgacaccacacatggttgatgacattcaagatgaagaagagctaaagcgctttgttgaagcttatcgtttattagctaaaataatattacgtttaaaagcatttgacgagtttgagtttacaattgatgaaattggaatggatgaacaagagaatgaagactataaaagtaaatatttagctgtgtacgatcaagtaaaaagagcgacggctgagaaaaataaagtatccattttaaatgatattgatttcgaaatagaaatgatgcgtaatgatacgattaatgtgaattatattatgaatatattgagacaaattgatcttgaagacaaagcggaacaacgtcgtaaccaagaacaaattagacgcattttagatcatgcagatgatccgacattgaggttaaaacgagatctaattagagaattcatcgacaatgttgtaccttctttaaataaggatgatgatatcgatcaagaatatgttaatttcgaaagcattaaaaaagaagcggagttcaaaggatttgctggagagagatctatcgatgaacaagccctaaaaacaatttcaaatgactaccagtatagtggtgttgtaaacccacatcaccttaaaaaaatgattggtgatttgccattgaaagaaaaacgtaaagcaagaaaagccattgaatctttcgtggcagaaacaactgaaaaatacggtgtgtaatgattcagccccctcgctagattagtgtagggggcattattattttctatcttttgttagttaccatgtgtttggcaaccatcatttggtttcaatacaattttataatcgtatgtgtatagaaataatgtctataggcatttaaaatagtttataatattaacaggataagtattaaatgtatgttgaaggaggtgcgtagctatggataatagaaatatgattaatcgtgtttttagtcaaaagatattacatcaaattgcaatcaaaaataaaagtgatgttgttgatgaggcatatgatttttatatacagggacctaaaaatatcaatgtaatacagaagatgaaatctttatataactatcttaaaaagtcttatcgtaacgaatatttttacaaaaacacaatacttaataaactccttctaggacgacattctattaatacaactactgcactttctgagatgcccatagggaaaagtattgctgattttatattgttaaacggcaaaggcgttgtctatgagattaaaacagaattagataagctggatagattagataatcaaattaatgattattatgaagtgtttaattatgtcgtagttattacaaatgacaaacatctgaataaagttatggctagatacaaagatacaacagttggaattttagtgttaacaactagaaatacactgagtgaagttcaaaaacctaaagaaaacaatagtctcttaaacacaaaagcgatgtacaactttttacgaaaagaagaaagaaaaagagttattgcacaaaatcatatggatgtgccaacttataatgatttcacagagtatgatgtgttatttgacgtgtttaaagaaataccaatgacgaaactgcataacaatatgatttctgagttgaaaaaaagaggaaacatgaaagaatacaaagatgaatttttagcagcgccggctgaaattaagttcttgttatatttcgcaaaaatgacaaagaaagataaaaataaactatatcattttcttaaggaggattaatatgtattatccttatttgcgtgggaaacaaaatgaactatttgcaattagagaattgttagagaaaggtttgattggtgattgtattcaacctataattgaaccaattaaatatacaaccacatttaaaaatactttgcaatactgtggtgaaaaagcattctctataaatttagtagtaaattcaaagttaactgaagaagagattagtaacgaaactgttgcacatttaactgaaataataacaaaaaacaaaagtgttattcaaaaagcttacttgggtccttctgatgaaggcaatgataggttgaaacagcaattttcaagtaatagtttagctattttaacaagtgtagatgattgggaaatgtttggagataaaaataaacttgaaatggtttttgtaccagatgatagacacattaaacgtaaattgcgtaatattccaaacaaaggcatcattatggatccttttaataaactaagtcgtaatgttgattatttagataatgatgacgagttttatagcgacgatcacctttattataaggaagatggatacgtagcattttcagactattctgttataggtggagaatatgtagacggtggcttttcgccattagctattgcgatacatattgtctattttgatgaggctaatgagctaagagttaagcattttgtctctgattctaataatgatagatcaaatccaggtaaaaagttttttgaggctgtagataaattagtaacatggtcaaaaaacttagatattaaaaatagatcttatgcgcttggacaatttgaagaattaaatgaaaataataagtatccaggattaggtttaattaaaaggttatctatcatgcatcacctagaaattatgaatagatacttggagtctcaaaatgaaaatatgtgaaaaatgttttaataatactgaaatcgtagaaatcattgcaaatgataatagcaaatttgacaattgtgatattgataacaatcatcttggtgttaaaatatttgatacgactaaggacatagataaattagaacttattagagattatttaagaccagcattagaattatatgatattagtataaatttaccagatacttttagcccaaaagaaggtaaaaagattgaaatagcattaaaagacgactggagtatatttaatgttgaggaagctcaaataagttgtattttaaatgaactttttaaagatgatgaaaatttagatagacgagtgttggaagatttagtaggcgctaaaatcataaacgataaaaaatatacaaataaaaatctaattgtagcaaataatgactgggatggattttgtgagagcttgaagtataaaaatagatttcataataatatgatcaatttagagaatttagcgttctttctcgatatcactactaattactatagtattgaggaatttagagaaagatttgaaccattatatagatctagaatagttaagttcattacagagaaaagtgaactaatgtcaccaccaaagggatttgcaacggcaggaagattgaattctaaatggataagcgtattataccttagtacaaaagaacaggtcagtatagaagaagttaaacctaagcataatgacattatttatataggtaaggttaagttacaaaaaaacgtgacaaaagagaaattgaaaattgcgaatttaactaatttaactagtaatgcaatcaaagctggcgatgatggatttagaaagtattttgtaaattaccaaacattaaaaaagattcataaaggaataacaaatccaagcgatgaacaaggaatagattatttgccatttcaatatttagctgattatattcgaagccttaaatatgacgggataatgtatgagagcatattacaagatggtacttttaactttgtgttttttgatcaaagtttatttgaatgtgttaattatgaaagaaaaagagtaagtgacgttaaatatacattgactaagctaagttgacacactcaaaaatctgaatattctaataaaatataaataatcccccgcacttcacatagtggcgggggatttattctggcgttaaaatgcccaaagtatgggggtgactcttaaatcatggcaaagcacctaaaacttgatatggtgccgagccctaacttagcacaatatagttagtatgacaaagtcatctaacataacacatcagaagtcgcgcaatttatttcagaccatacagtgataaagttgcacaacgcatgacttttatttagcaataactgctacttctgaaataagttgctttgcatagtctgactgcggatgtttgataatatcttctgtgttattcagttcaacgatttcgccatttttcataactgcaacgcgatcacatatttcattgataacacccatgtcatgtgtgatgaataaataagtgatgccgaagtctaactgtaattgttttaataactcgatgatatctttttgaattgaaacgtctaaagcggacactgcctcgtcgcaaacaatcactttaggttctacagcaagtgctctcgcgatacttacacgctgacgttgcccaccagataattcgtgtggatagcgatataagaaactttgatctaggccaaccttttctaacaacgatacgacagttttaataatgtcatcattatctttgactttcccatgaatgattagtggtcgtttaatcacatcaatgactttaaatcttggattaatagatgcgaatggatcttgaaaaatcatttgtatctcttgtcgtaaagatttcaattcatcatctttaaataaacttaatggtaattcgttataccaaataaagccttctgacacttcctttagaccgacgaccgtcttagctaatgtcgatttccctgaccctgactcaccaacaatgcctaatgtttcgccttttctaatagccaagttaatagcattaactgctcggtataggctaccactcggtgatgtgtaatccacgctcacgcgcttgaattttaataaaatatcattgtttaacaatcttggcggacgcgtttgatgaatatcaggaattgcatctattaagcgtttcgtataggtatgttgtggcgatttaaaaatactttcaaccgtgccactttcaacgacacttccatctttcattacaatcacatcgtcgcaaaattgatacacagcgcctaaatcgtgagtgataaaaataatagacgtttcggtgtactcataaagggacttcattaactgcagtaattgattttgtgtactggcatctaatgccgttgttggttcatctgcgattaaaatttgtggctttaaaatcaatgccattgctatcatgacacgttgacgcataccaccagaaagttcatgtggataagcatcaaattgtcgagttgcatgttttatacctactttttctaaaatgtctattgtcatcgactttgcttcagatttagatacacgtttatgttgaaatagtacttctgtaatttgtttgccgatcgttaatcttggatttaacgaagagagtggatcttgaaaaatcattgaaatatccttacctcgaatttgttgtaacgctgaagttgataaattagttaacgattgcccattaaaaataatttctcctgttaatgtgtgatctggataatctggtagtagccctaaaatagatttagcagtaatactttttcctgatcctgattcaccaacaatacctaggatatgtttttttcgtaattcgaaagagacgttttttaccgcttgaactgtagtttcatcataattgaattgtacattcagactgttgacttctaataaatttgacatgatgttgtgcctccctattcacaaatgtgtatatttattctatacttttgtatatcatagtaatctactcaagattattttacaaggagtgattatcataattacttatttagaatcttttaagtcgttgtatcacaaggcattttacaagtttgtattatcggtattaagcttgccaatatttttatatgcagtgataaagtttttcttttctgctaagagaaaaaatttttacgctaataattctgaaatttcagaatttgaacaggcgttacatcaaaaatataaatatttatcgcagcaaaagtcatccacacaaatacataaagaagcattaaaaatattcaaggcacaaagttctaatacgagttcaaagaatattgaacaagcacatttttcaacatactttgaaaatgtattatttcataagttcatcatgatcaaagtgatattggccttgccgatgttcatcttattgactttttatttacagccattagttagatatatttttgaacgaattgtcatggctgtgattgtcatcattggtgttattgtcagtgtgtttaccattctgtatttttcaccgcttgatgcggcttatagcatactgggacaaaatgcaacaaaggcacagatacatcaattcaatgtattacatcatcttaacgaaccttattttattcaattgtgggataccatcaagggtgtttttacctttgacttaggtacgacttacaaagggaatgaggttgtgactaaagcagttggcgaaagaattccaattacaataattgtcgcagtattagcgctaatggtggcattaattattgcaataccaattggtattatcagtgcgatgaagcgaaatagttggcttgatatcacgttaatgataattgcattaattggtttatctattccaagtttctggcaagggctattattcattttagcgttctcattgaaattggatattttgccaccatcttatatgccagaacatccaatatcgttgattttacctgtacttgtcattggaacaagtattgctgcttctatcacgcgtatgacaaggtcttctgtacttgaagtaatgcgcagcgattatgttttaactgcttatgcaaaaggattatcgacgacacaagttgttattaaacatattttgaaaaatgccattattccaattgtaacgctagttggtcttctagtggcagagttactaggcggttcagcagtgacggaacaagtatttaacattaatggtatcgggcgttatatcgtccaaaaacaactaatacctgatattccagcagtcatgggtggggtcgtatatatatcaattgtaatatctttagcaaacttaattattgatatattttatgctttaatcgatccaaaattacgtagtgaaattaacgaaaggaagtgaggcatatggtaaaacttacaacaaagatagcttccttaaaactattcgcaagttatgctatagcaacttatattttagttatattaacgagtgcattaaatctttttaaaggttatgtggccgatacgttctatattgctgaaacattgctaatcgttttaaccatcattttaattatcattttaacaacggaacaaacatggaagcatcatgacctatggcgacgtatcgtcgaagtgttgttattgttgatggcattaacaggcaacgtatttacattattaatgtttgtaagtattagacgttaccaacgtacatcgcaaatacatagttataacgggtgggaatcgtttatacgaaaaactactagacatcgtattgcgattatcgggttacttattttagtctacatgctgacattatcaattgtgtcacaatttacatttgatacgacattggctactaaaaatcagttcaatgcactgttacatggaccgagtctagcctatccgtttggtactgatgatttcggtagagacttatttacacgcgtagttgtaggaacgaagctgacattttcaatttcaattatttcagtagttattgcagttatttttggtgtgttactaggcactatcgcaggttattttaatcatattgataatttaataatgcgaattttagatgtagtgtttgcaattccatcattattgttagcggtggcaattattgcatcatttggagcaagtattccaaatttaattattgctttaagtatcggtaatataccatcatttgcacggacaatgcgtgccagtgttttagaaattaaacgcatggaatatgtagatgcagcacgtatcactggtgaaaacacttggaatatcatatggcgttatattttaccgaatgcgattgcgcctatgattgtacgtttttcattaaatataggtgtggttgtattaacaacaagtagtttaagtttcctaggacttggtgttgcacctgatgtagctgaatggggcaacattttacgtaccggtagtaactacttggaaacgcacagtaatttagctattgtacctggtgtttgtattatgttcgtcgttttagcatttaattttataggtgatgcagtgcgtgatgcactagatccaagaattcattaaaaaggtagggatagatgtgaagaaaatcattagtatcgcaattatagttttagcgttggtattaagtggttgtggtgtccctacgaaatcagaagtggctcaaaagtcatcgaaagttgaagtgaaaggcgagcgaccaacgatacatttcctaggacaagcaagttatgaaaatgatatgaatatcgttaaagatcaattggaaaatgcaggatttaacgtgaagatgaatatccaaccagattatggtagctatcgtacacaacgtcaagccggcaattatgatatccaaattgatgactggatgacagtatttggtgacccgaactatgctatgacggcattatttagttctacaggatcaaatagtttattgaaagataaacatgtagaccagttgttaaataaagcttctactcaaaatgaagcagatgttaaacaaacatataagcaaattgaagatgaagttgtatttgataaagggtatatggcgcctttatatggatcaaaaaagaatttagtatatgacaataaagtgttagataaaaatagtgttggattgccaaattcacgtgcattaatatggcaacaatttgattacaacaatagtagagaacgagatacgcggccacttgtgatgacacaacaagatggtgaaattcctacattggatccaatacgttcaattgcgccgtcagtatattcaattaatatgaatatgtacacaaggttattattattagatgaaaatgatcatttaacaacgaaaggttcgttaagtcatgattatgctgtgaataaggacaataaagcattttatttcttgttaagagatgatgattattttgcgaaagtggtcaatggacaagcacgtaatactggagagcgtgtatcggctgaagatgttaagttttctttagatagagcacgtgataaaaagtctgtgcctaacaataatacttacaatatgcacaaacatataaatgacatcaagatattaaaagatgaggacatcgatcagttgcgtaaagagaaagacaaggacgataaatcaatctatgataagttgattaaagcttataacgtcaaatcgttaacgacagatggtcaaaaagtaaataataaagacggtatttatcaaattgttaaaattacgacagatcaatcgatgcctcgagaggtaaattacttaacacactcttcggcaggcattttatctaaaaaatttgttaatcaagtaaatcaagaatatccaaaaggatatggggatagcagtacaattcctgcaaattcagatgggaaaaatgcgctgtatgcaagtggcgcatacattatgacacagaaaaatgcatatcaagcaacgtttcaacgtaatccaggattcaacgaaacagaaaaaggtagttatggaccagctaaaattaaaaatattacattgaagtttaatggtgacccgaataatgcattgtcagaacttagaaatcattcaattgatatgttggcagatgtgaatcaaaaacattttgatttaattaagtcggataaaaatttaagcattattcgcaaaaatggacgcaagtcagtctttttaatgctaaatattaaaaaaggtatatttaagacgcatccaaacttgagacaagcagtagttaatgcgatagatcaggatcaatttattaagttttatcgtggcgataaatttaaaattgcatcaccgattacaccacttgtcgatactggtaacgagcaacgtcaagatttagaaaaagtagaaaaagccattaatcaataatgttttaaatatttaacagaaagtaggaggatatagtatggtcattaacttaaatgacaaacagacaaaaacatctaaagaagggttaatttccgtatcacatcctcttgcggctaaaattggtaaggatgtattagatcaaggtggcaacgccatggatgcagtgattgcaattcaactggcattgaatgtggtagaaccatttgcatcaggtattggtggtggcgggtatttgctatattatgagcaaagtactggcagtataactgcgtttgatgcgcgtgagacagcccctgcacatgtagataaacaattttatctagatgattcaggcgaatataaatcattttttgatatgactacacatggtaaaactgtcgctgtgccagcaattccaaagctgtttgattatattcacaagcgttatgctaagttgtcattggaagatttaattaatcctgcaattgaactagctattgaaggtcatgcagccaattgggctactgaaaaatattcgcgccagcaacacgcacgattgacaaagtattatgaaacggcacaagtatttacgcatgaaaatcaatattggcgtgaaggtgattggattgtacaacccgaattaggtaagacatttcaaatattaagagaacaagggtttaatgcattttataaaggtgacattgcgaaacaattagtcaatgttgtcaaagcatgtggtgggacaatcactttagaggatctagccaaatatgacattcagattaaagcgccaatcagtgcaacatttaaagactatgacatttattcaatgggaccatctagttctggcggtatcacggtaattcaaatattgaagttattagaacatgtcgatttaccatctatgggtccaagatctgtcgattacttgcatcatttgatacaagcgatgcatttagcatatagtgatcgcgcgcaatacttggcggatgataattttcatgaggtgcctgtacagtcattaattgatgacgattatttaaaagcacgcagtacgctcattgatagcaataaagcaaatattgatatagagcatggtgttgtgtctgattgcattagtcatacagatgttgaagaaaatcataccgaaacaactcatttttgtgtgattgataaggaaggtaatattgcttcatttacgacatcaatcggtatgatttacggatcgggtattacgattccagggtacggcgtgttattgaataccacaatggatggttttgatgtagtagatggtggtattaacgaaattgcaccatataaacgaccactaagtaacatggctccaacgattgtgatgcatcacgggaagccgatattaacagtaggtgcacctggtgccataagtatcattgctagtgttgcgcaaacattaatcaatgtattagtgtttggcatggatattcagcaggctatagatgaacctagaatttatagtagccatcctaatcgcattgaatgggagcctcaattttcacaatctacaatattagcattgattgcacgtggacatgcaatggaacataaaccagatgcctatattggagatgtacatgggttacaggttgacttgaatacacgtgacgcgtcgggaggtgctgatgatacgagggaaggcacagtgataggtggcgatgtattatcaattagaaaacaaccattacctagtccgaaaatatacgataatgacacccatcgagtatatttcaatgatatgcagttgccattatatgctgaacaagtgcggtggatgcatgacaaatattgggttgatgaaagtgttattagaatcattttccctgaagttagtgtgcatattgaagatttaagaagttatgaaatcgccggaaaaaattatatagatattgcctggttggcacggaagaaaggttatcaagttaccttaaaggatgacagtttatacttaactgatgaaacatatcattcagtgaaagcaaacacaaatgcatactatagatatgatcgagatagtatcacaagataatttatgtatttgatatatagtttgaagtggattttgattcttgttgaacgaaagggttcgatttcaaactttagagtgatgcttgagtgtagtaatgttgaagttgttataagaaacgctagtcgcctttgtaaaatataaaacgccccacaaattcgtttttgatgtacaccacaatagttagtctaaaatctaacttgatgtgattcggtacaattaaatgaatgatgtgaggcgtttttataatgtgtgattttaataaatgatttggttatttctataattacatcataagtattaatgttcacttaatttattataagtaatgctttctttgtatataatttggtcttttccaggacttgaaaaataaaaataaagtttctgatcttgatgattattgccttttaaatcactcattccctttaattccacctttgttgatgcatttctgggaatattatatctacgttttaattgtttaacgtttggattatcattcgacaacttaccagataaattataataatcagtggtaggatcatgtgtgactttcaaatcattgctatttaaaatgcttgttaaatcaccactttgaatcaaaaattgattgttttcgattttttgtttcagcgcgggatcttttacgtcttttgtgaaaacgattttattattaactacttttactggataacttttgtatgtcgagtcagtagcattttttctatcgtttgtagttgtgtcatattcaccagttattttatgtgtgttcttatctacctttaacaacatacggtcttcttttaaaagctcatctgatccaacaactgaataagaggattctatataccatgtgtcttgatcattattttcataatggggattatcgtgaccatcaatttcataaagcgtttctaagtttttaataggatacgtacttagtacttttttaagaccatctttcaaatgaatttgttcccacttcattgccaaaaacataccgccactgactacaattgaaataataataattgctgctaagtttaaccagaaaattttatgtgctttcatacattcccaccgtttctcaaaatacttcattaacactataataatatattttgaaaaatatttacatcagtattaaagtgaatatcaaattttaaatttatgaaaataatagatatttataaaaagcggaaaagagatacaataaaaaactgcatgacgttgaggagtcacacagtgtaattaaaaatttaaaatgtagttgctaatttttcagcattattaatactagttgctttaatttcttcagtcttatgaggttcagcattgtgtccttcaataatgattgtttcatatgatggcacacctaagaatgtcataattgttcttaaataacggtcacccatttcaaaatcagcagcaggtccttcagtataatatccaccacgtgattgaatgtgtaatacttttttgtcagttaacaaaccttgaggtccttcagcagaatatttaaaagttttacctgcaattgaaatagcatcaatatatgctttaactacaggtgggaaagaaaggttccacataggcgttacaaatacatatttatctgcacttaaaaattcttctaaaatgtcactcaatcttgaaactttcatttgttcatcatcagttaacgtttcgccattactcatttttccccaaccagttaatacatctttgtcaataactggaatataagtttcaaataaatcaatatgtttcacttcatcatcaggatgttgttgttgatatgtttcgataaatgctttaccagccgccatagaatttgataccagttcattaaaagggtgtgctgtaatatataatacttttgccatttgaaaattctcctctgtttctgttattttcttgagtataattattatattagatataaaatttgatatcaataaaaatattcaaattaccatcattttcttcatctatatttggcagtactactaaagtatgagtgcatttaattatgaaatagttgatttagaatatatacttaatacccaaaatatatgaaggatggatgccactatgacaaagcgaccaaaacgtattttggcaacaattatcatttttctttcactattatttacgtttatttatatagatgacattcaaaaatggtttaaccaatataccgataaattgacacaaaatcataaaggacaaggacactcaaaatgggaagacttttttagagggagtaggattactgagacttttggcaaatatcaacattcaccatttgatggtaagcattatggcattgattttgcattgccaaaaggtacaccaattaaagcgccgacgaatggtaaagtaacacgtatctttaataatgaattaggcggcaaggtattacagattgccgaagacaatggagaatatcaccagtggtatctacacttagacaaatataatgtcaaagtaggtgatcgagttaaagcaggtgatattattgcatattcaggcaatacaggtaaacaaacgacaggcgcacatttacattttcaaagaatgaagggtggcgtaggtaatgcatatgcagaagatcctaaaccgtttatcgatcagttacctgatggggaacgtagcctatatgatttgtagttatagaagagtgcccgcagtctaaaaaattaagcaatcattgtgtgagtatgatacttacataatggttgcttttttcaatgaaaatcataatgctaagtcatacttgtttgatttagatattacttaaaatgtaagacaaggttgtttgcattggcagtgaaatatcgcacataaaaaaacattattgtcacactagaaaatagttgtgcactatatcaattttctgtataaaagtttaattctgacagtaatgtaaacgtttacaatttatgattgacattaataatgactgaatatatgatttatgtaagtatttgtgcaaacgttttcacaaagtgtattgcacaatcaaactgtaaacaaagtatgggaggcataacatggcagaactaaagttagagcatattaaaaagacgtatgataacaacaatactgtagtgaaagattttaatctacatattactgacaaagaattcattgtatttgttggaccatcgggatgtggtaaatcaacaacattacgaatggttgctggactagagtctatcacatctggagatttttatattgatggggaacgcatgaacgatgttgaaccaaagaatagagatattgcgatggtatttcaaaactatgcattatatccacatatgactgtttttgaaaatatggcatttgggctaaagctacgtaaagtaaataaaaaagagattgaacaaaaagttaatgaagcagctgaaatattaggattaactgagtatcttggtcgtaaaccaaaagcgttatctggcggacagcgtcaacgtgttgctttgggcagagctattgttagggatgcgaaagtctttttaatggatgaaccattatcgaatcttgatgcgaagcttcgagtacaaatgcgcacagaaatattgaaattacataagcgacttaatactacgacaatttatgttacacatgatcaaactgaagcattgacgatggctagtcgaattgttgttttgaaagatggcgacattatgcaagtcggcacacctagagaaatatatgatgcccctaattgcatatttgtggcgcaatttatcggctcaccagcaatgaatatgttgaatgctacagttgaaatggacggattgaaggtaggaacacaccattttaaattacataataaaaaatttgaaaagttaaaagctgctggctacttagacaaggaaattattttaggtattcgagctgaagacattcatgaagaaccaatatttattcaaacttctccagagacacaatttgaatctgaagtagttgtatccgaactgttaggttcagaaattatggtacatagcacattccaaggaatggaattgatttctaaattagattcaagaacacaagtgatggcgaacgacaagattacactagcatttgatatgaataagtgtcacttttttgatgaaaaaacaggaaatcgtatcgtctaagggggagtattcatgtctaaaattttaaaatgtgtcacgttagccgtggtaatgttattaatcgtaactgcatgtggccctaatcgttcgaaagaagatattgataaagcattgaataaagataattctaaagacaagcctaaccaacttacgatgtgggtggatggcgacaagcaaatggcgttttataaaaaaattacggatcaatatactaaaaaaactggcatcaaagtaaagcttgtaaatattggtcaaaatgatcaactagaaaatatttcgctagacgctcctgcaggaaaaggtccagatatctttttcttagcacatgataatactggaagtgcctatctacaaggcttagctgctgaaatcaaattatcaaaagatgagttgaaaggtttcaataagcaagcacttaaagcgatgaattatgacaataagcaactagcattgccagctatcgtagaaacaaccgcacttttctataataaaaaattagtgaaaaatgcaccgcaaacgttagaagaagttgaagctaatgctgccaagctaactgatagtaaaaagaaacaatacggtatgttatttgatgctaaaaatttctattttaattatccgtttttattcggcaatgatgattatattttcaagaaaaatggcagtgaatatgatattcatcagctaggactaaattcaaaacatgtcgtcaaaaatgctgaacgattacaaaaatggtacgacaaagggtatcttcctaaggcagcaacacatgatgtcatgattggtctttttaaagaaggaaaagtaggacaatttgtcactggaccgtggaacattaatgaatatcaagaaacgtttggtaaagatttaggagtaacaacattacctacagatggtggcaaacctatgaaaccatttctcggtgtacgtggttggtatttatctgaatatagtaaacataagtattgggctaaagatttaatgctgtatatcactagtaaagatacattacaaaaatatacagatgaaatgagcgaaattactggacgtgttgacgtgaaatcatctaatccaaatttaaaagtgtttgaaaagcaagcacgtcatgctgaaccgatgcctaatattcctgaaatgcgacaagtttgggaaccgatgggcaatgcaagcatatttatttcaaatggtaagaatcctaaacaagcgttagatgaggcgacgaatgatataacgcaaaatattaagattcttcatccatcacaaaatgataagaaaggagattagttatgacgaaacgtaaccctaaattagcggcattattatctgttatacctggtttgggacagttttataataaaagacccattaaagggacgatattttttatctttttcatcagttttatttctgttttttatagctttttaaatattggtttttggggattgttcacattagggacagtacctaagttagacgattctcgtgtcttacttgcacaaggtattatttctatcttactcgttgctttcgcaatcatgctatatatcattaatattttagatgcatatcgtaatgctgaacgatttaatcgcaatgaggaaataaaggatccgaaggcgcgtatggtggcaacatgggacaagacgttcccatacttactaatctcaccaggtacattcttattgatatttgtagttgtatttccattaatatttatgtttggagtagcatttacaaactacaatttatacaacgcgcctccgagacacacattagaatgggttggtttagataactttaaaacgttattcacaattggcgtttggcgcaaaacatttttcagtgttattacttggacattagtatggacgcttgttgcaacgacacttcaaattgcattagggctgtttttggcaattattgtaaatcaccctgtcgtcaaaggtaagaaatttatccgtactgtgttaatcctaccttgggctgtaccatcatttgtgacaattttaatatttgtagcgttatttaatgatgaatttggtgcgataaataatgatattttgcaacctttattaggtgtagcaccagcatggttaagtgatccgttttgggcaaaagtggcattaatcggcattcaagtatggcttggattcccatttgtctttgcactgttcactggagtactgcaaagtatttcatcagattggtacgaagcagcagatatggatggtgcgtctagttggcaaaagtttagaaacatcacattcccgcatgtcatttacgccacagcgccattgttaattatgcaatatgcaggtaatttcaataattttaatcttatttatctatttaataaaggcggtccaccagtgtcagggcagaatgctggtagtacagatatcttgatatcttgggtgtataatctgacatttgagtttaacaacttcaacatgggtgcagttgtgtcattaattattggatttattgttgctattgtcgcatttattcaattcagacgtacaagtacgtttaaagatgagggaggtttataagatgacaaagaagaaaaacatattaaaagcaatcggtatttacagttttatagcgatgatgtttgtcatcattttatatccactactgtggacatttggcatttcccttaatccaggtacgaacttgtatggtgccaaaatgataccagacaatgcaacatttaaaaattatgcattcttactattcgatgacagtagtcaatacctgacttggtataaaaatacgcttatcgtagcatctgcaaatgcactgtttagtgtgatatttgtcacgttaacagcatatgctttttctagatatcgctttgttggtcgtaaatacgggctgattacatttttgattttacaaatgttccctgtattaatggcaatggtcgcaatctatattttgctaaatacaattggtttattagattctttatttggactaacactggtatatattggtggatcaataccgatgaatgcctttttagtgaaaggttacttcgatacgattccaaaagaacttgatgaatctgccaaaattgatggtgcagggcatatgcgtattttcttacaaattatgcttccattagctaagccgattttagcagttgttgctttgttcaattttatgggaccatttatggactttatattacctaaaatactattaagaagtcctgaaaaattcacattagcagttggattgttcaactttattaatgataagtatgcaaataatttcacagtgtttgcagcaggggcaattatgattgcagtacctatagcaatcgtattcttgttcttgcaacgctatttagtatcaggtttaacaacaggtgcgacaaaaggttagtttgaaattaggagtggggcagaattgataaagaaccactaatgacgataaagattaaaaggaggacgttatgatgacgattaaagttggaatcattgggtgtggtggtattgcgaatggcaagcacatgccaagtttacaaaaagttgaaaatgttgaaatgatcgcattttgtgacgtagacatttcgaaagcagcgagtgcgtcagaagcatacggaactgacaatgcaaaggtttatgatgattacaaagcattgttaaaagatgacacgattgatgttatccatgtttgtacgccaaatgactcgcattgtgaaattactgtagcagggttgcatgccggtaaacatgtgatgtgtgaaaaaccaatggctaaaacgacagcagaagctcaaaaaatgatagatacagctaaatcaacaggtaaaaaattaacaataggttatcaaaatcgcttcagaccagatagtcaatttttatataaatcagcgcaacgtggcgacttaggagacatttacttcggaaaggcacatgccattcgtcgtcgagcagtaccaacatggggtgtctttctagacgaagaagctcaaggtggaggaccattaatcgatatcggtacacacgctttagatttaacgttatggatgatggataattatgagccagaatcagtgatgggttcaacattccataaattaaataaacagcatcatgcggcaaacgcttggggttcatggaatccagatgaatttacagttgaagattctgcgtttggctttattaaaatgaagaatggagcgacgatcattttagaatccgcttgggcgattaattctttagaagtggatgaggcaaaatgttcattatcaggaactaaagcaggtgctgatatgaaagatggtctacgtattcatggtgaagacatgggtacactttataccaaacacgttgaattggaaaacaaaggcgtcgacttttatgaaggtaatgaagtggatgaagctgaagaagaagcaaaagcttggattgatgcagttgtaaatgatactgaaccagttgtgaaaccggaacaagcaatggtagttacaaaaattcttgaagcgatttatcagtctgcaaaatcaggcaaagcaatttactttgaataacatcatacggtaaggaggcacatcatgacaaaattaaaagttggtgtgataggtgttggtggcattgcacaagaccgtcatattccagcattgctgaaactcaaagacacagtctcattagttgcagtacaagatattaatacagttcagatgattgatgttgcgaagcgctttaatatacctcaggcagttgagacacctagcgagctgtttaaacttgttgatgcggtggtcatttgtacacccaataaattccatgctgatctttctatagaagcattgaaccatggtgtccatgtcttatgcgaaaagccaatggcaatgacgacggaagagtgtgatcgcatgattgaagcggctaataaaaatcacaaattattaactgtcgcttatcattatcgtcacacagatgtcgctatgactgctaaaaaagcaattgaagcaggtgttgttggtaaaccattagtagcacgtgtacaagcgatgcgtaggcgtaaagtacctgggtggggcgtttttaccaataaagcgttgcaaggtggcggtagtttaatcgattatggttgccacttgttagacttatctttgtggctattaggtaaagatatggtgccgcatgaagtgctaggaaaaacatataatcaattgagcaaacaaccgaatcaaattaatgattggggaacatttgatcacactaaatttgatgtcgatgatcatgttactagttatatgacatttgccaatcgagcaagcatgcagtttgaatgttcgtggtctgcaaatataaaggaagataaggtacacgttagtttatcaggagaagatggcggtatcaatttatttccatttgaaatatatgagccccgctttggaactatttttgaaagcaaagctaatgttgagcataacgaagacattgctggtgagagacaggcgcgtaactttgtcaatgcgtgtttaggtatagaagagattgtggtgaaaccggaagaagcacgcaatgtaaatgcccttatagaagcgatttatcgtagtgatcttgataataagagtatacaactttaatgattatcatatatgatacaaaattctcaatataaaaagaaggagtgcttttcaatgaaaataggtgtattttcagtattattttacgataaaaattttgaagatatgttagattatgtcgcagaatctggattggatatgattgaagttggaacaggtggtaacccaggagataaattttgtaagttagatgagttgttagaaaatgaagacaagcgccaagcatttatgaagtcaatcacagacagaggcttacaaataagtggtttcagttgtcataacaatccaatttctccagatccgacagaagcgaaagaagccgatgaaacgttacgtaaaacaatccgtttagcaaatctattagacgtgccagttgttaatacattttctggcattgcaggatcagatgataccgctaaaaagcctaattggcctgttacaccttggccaacagcctactctgaaatttatgattatcagtggaatgaaaagttgataccatattggcaagatttagctgagtttgcaaaagagcaagatgtaaaaattgccatagagttgcatgcaggatttttagttcatacaccatatacgatgttgaagttgcgtgaggctacaaatgaatatatcggtgctaacttagatcctagtcatttatggtggcaaggtattgacccaattgctgcgattcgcatattaggccaagcaaatgcaattcatcacttccatgctaaagatacgtatattaatcaagaaaatgtaaatatgtatggtctaactgatatgcaaccatatggtaacgttgcgacaagagcatggacattccgtacagttggttatggacatagtccatatgtatgggcagatatcataagtcaacttattattaatggatatgattatgtattaagtattgaacatgaagatcctattatgtcagtagaagaaggtttccaaaaagcttgtcaaactttgaaatctgttaatatttacgacaagccagcagacatgtggtgggcataatacgaactcgaggttagtctgaagtttgtctgaagtaagactggtggcagtgttgaataaatgcatatgtcgccaagccattgccaaaaatttcacaccttaaatcatgtcattgtttgtaaagaaggtgtattttatataagtatttagcgatgatcatacccattcacagtaacaatcctcaccattgaaaagagtatataacctttacgatagtgaggtatatgataataaaaaaagcctgttgtcacaatggtcatagacacgacatactttaaagatttctgaatataatatttcagaacgcactttaaagatggacgtcgatgtcgactaatgtgatgacaggctttcatctttttaaatattcattaatttctcttcttgtttaatacgtacatataagaaatacgcatacggtactaataaaatagttgtatatgttgcgtgtgttaataataatacaccgattaattcaggaatgatgtttaagaagtaatttgggtgttttgtaattttatataatccagatttaataataggatggttaggtaaaatgaataattttaatgtccaaataccacctaaagttttaataaccataaataacatgatataagcaaagattaatataactaagccaataccatttgcaaagctaaatgtatctttattaataaatgcctctacaccagccaatacataaattaaaacgtgtgttattgctaaaaacttcgaatttttaacgccatattcaactgcaccgtctgcttttaattgttttgagtgattaatagatatctttaagctgacaagtctgatacagaaaaagataagtaatatagatagaatcatgatgtcctccgtcattatgtcatatgtataagcgttgattttgacaacataaagtattttatagataaagcttgtcaaatactattaactatttattaattttagtacataaatatgtttctaagtatgtgtttatgttcagtattttggataatttaataattttaaggatattaagcgcttacaccgacgtgatatatttggcttaacgaaaatgattgaggtgacagagatgaacttttttgatatccataagattccgaacaaaggcattccattatcggtacaacgtaaattatggcttagaaactttatgcaagctttctttgtagtgttctttgtttatatggctatgtatttaattcgaaacaattttaaggcggcacaaccgtttttaaaagaggaaattggattatctacattagaacttggttatatcggattagcatttagtatcacgtacggtttagggaaaacattacttggatattttgtcgatggacgtaacacaaaacgtattatctcgttcttacttatcttatctgcgattacagttttaattatgggatttgttttaagttactttggttctgtaatgggattattaattgtactttggggacttaacggggtgttccaatcagttggtggacctgcaagttattcaacgatttcaagatgggcgccaagaacgaaacgtggccgatacttaggattctggaatacatcacataatatcggtggtgccattgcaggtggtgttgcactttggggtgctaatgtattcttccatggaaatgttatagggatgttcattttcccatcggtgattgcattacttattggtatcgcaacattatttatcggaaaagatgatccagaagaattaggatggaatcgtgctgaagaaatttgggaagagccggttgataaagaaaatattgattctcaaggtatgacgaaatgggagatctttaaaaaatatatcctgggaaatcctgttatatggattctatgtgtttcaaacgtctttgtatacattgtacgaatcggtattgataactgggcaccgttatatgtgtcagagcatttacactttagtaaaggcgatgcagttaatacgatattctactttgaaattggtgcattagttgcaagtttattatggggctacgtatcagacttattaaaaggtcgtcgtgcaattgtagctattggctgtatgtttatgattacatttgttgtcttattctacacaaatgctacaagtgtcatgatggttaacatttcattgtttgcattaggtgcgttaatctttggtccgcaattattaattggtgtatcattgactggttttgttcctaaaaatgccatcagtgtagcaaacggaatgacaggttcattcgcgtatctattcggtgactcaatggcaaaagttggtttggcggctattgctgatccaacacgtaacggtttaaacatctttggatatacattaagtggatggacagatgttttcatcgtcttctatgttgcattattcctaggcatgattctattaggaatcgttgctttctatgaagaaaagaaaattagaagtttaaaaatttaatataaatcggattaaaagtatcgccaatctattgcaatatagttggcaatcctgccccgacggcatgtgcgtgaagagatgaaagatactgcttctacccttgcaaatatatcatctctatgtctcggggcagatcataattccctgttatgaagtatccttatttgcccgacttagggtgactcaatgaatttactccttacaataaagacatatagcggtgtcaatattgtagggagtattgttttatatttaaactctctaaaaagcggactgatagaaaagtgaaaacttctctatcagtccgctttttcatagaacaaaatggatgcgccataatcattagttatttgctaatctattttgcttgcttacaataatcacttggcgacatttgtaaatattttttaaaatgatagctaaacattttatactctgaaaagcctactttgtctgcaatttcatagtgtttgtaatgtcgatctaacaattgcagagattgtaaaatacgatagcgatttaaataatcgacaattgtaataccaacatgatctttaaatgttcgcatcgcatacgattcactaacatcgatatgttgaattaaatctgaaacagtcactttcgtttgataagattgcttaatttgatcaacaatctgatttacataataatcatcgtattctacttttaatagtggttggaaggcatcatgacaagatgctaagctacggccgttctgtgattgttgctctaataaggtacggacaagtcttcctaaaataacttctaattgtgcatggtctactggttttaataaataatcaagaacatgatgttgaatgccggctttcatatattcaaagtcatcgtaactcgataatatgatgacattacaatctagatgcgcaatatcattgagtaaatcgacgccatttttacgtggcatacgaatatcagtaattactaattctggctgatgttgttgaattagtgataatgcttcaacaccatctttagcagtgtatattgtattgaaatgatagtctccccaaggaatgatttgctttaaaccttctcgaataattcgttcatcatcacaaataactaccttaaacatctacattcccccttgaaagtggtattttataacaaattaacgtaccttgattacgctttgaaaaaatatgaagtcgtgcatgtgaaccatattgaatcattgctttattgtgtaaatgatttaatcccaaatgcttagtatcaaatacatcattattaagagattggcgtacatattgcaggcgagatgacgacatcccgataccattgtcgcaaactaaaacatgtaaattctgacgtgccaatgtcaggcgtatagtaatgtccaatgactcagtatctctaccatgtttaatagcattttctatgagtggctgaagcatcattttaccaattgtctggtgacgcgcttcttcagaactttcaatatggagcttaatcatgtcatcaaaacggatgttttgtattgcaacatactgttcaatgtagttcaactcttcgtttaattccactgtatgtgagtttgtacgtaatgagtaacgtaacatttgcgataattgttggaccacagtttgtgctaatttcggagataacgtaattaaatattgtattgtttgcatcgtattgaataggaaatgaggctggaattggcgttctatttcctttaactgaatatcacgcaagcgacgttctgtatgctcgatagaatggatcagttgctcatttgattcaaataaatcgtaaatataattattaatttcttctagttcactgttgttttttaaaggcgtatatgtacctagatgacgatttttggcatagtaaattttttgaataatcgtttcgatatcttttgtttgtcgtttagccatattatctgcgctaatgaaaccaaatattactagtaaaacaagaactacggccataacaattaacaacgtgataccatcttcaatgttttcatgtatatctttataaataatgagacgatggtcatcatgatttaattttacagattcattcataaatccgaattgttgtggtctatacttttcacctatagtaaaacggtcatcgttggcgtataaaatattgtcatattgatcaacgataagtgcgaattgtcggctatctttcttaatttcacttaaacgtggggtgttagccatataaattttaagcatatatgtactatttttgaatttaagctgatgcgttgaaaataaatacatatttttagtgtttaaatgttcataattattggttataaactgatttggtccagataattcataataaagtgttgcgggctgttggtgtattaattttaataattcacgttttgtagcggtaacatcatgatgatttgttaaatcgagctcttgaaacgaattattatgctgtgtaataaatgtctgaatctgcttttcagtatgatgtaaagatgactgactttcatcaacatgttgatgaatcgtacgatgctcaatccaaatatagatggcatagaagcttactagtccaataataatgactaaaaatactggaaaaatagtagacgcaaataacgatcgtctcaattgatgtctataaggtttgtatgccgtcattgaatcatctccaaaaatttatgatgtggaatgtccggtaatttagatttcggtattaaaggtatgttcttaagattttcgatagactgatcgctttgttcactaacatcctttcgaattgacttggcatcgaactctgcaactaatcgttgttgtactgagcggcttgttaaatattgcactaactttttacgcttaggatgagggtgtgcatttttaactaaagcaataccatcaacatttaacattgttccttcaattggataaacgattgatacaggataacctttgtttttccatgtgcgtgcatcttgttcgtagcttaggcctgcgtaatatttacctttagcaacatcttcaatgactttagacgtctttgacagttgcatcgcgtggtcttggaattgatgcacatcacttactcgatgatgcatgctataaatagcgcgcatatgttgatagcctgtcgttgttgtatttggatttgagtacgcaattttacctttaagtataggttgtaataaatcttgataacctcgaatcttaatatctccttgtaaatctgaattaactactataactgttggcattaatagaaaactagtaacatatttattgttcgagcgataatcctctaattgctgtgttacagatgtatcttgatagggaacaaaatcttctggatgatcaattgtttctgacaacacaccacccataaagacatcaccacgctccgaaaaatcttcattatgcaagtttgaaagcagtacttgagtagatccgtgtttaatttcaattttgacatgctcttgtttttcaaattcatttaaaattggacgaatcaagtttgattgatacggagaataaactgttaatacatttttatctgattcagagtgacgcgtattagcgcatgctgataaaaaaatgagaaataatagcaagatataaatttttgatttcatgatatcccatcaattctatgtatattttaatacaataattttagcaataaatgacgcataagtaatgttaaatatttagaaatgtttatagatgacttgttaagacgttgcaaatgttgtgatagcacaaaatttttgtttgtcaagacgatttaccgaggctgtaaaatcaaactgttatattttatttgtagctgttatataaaaatcggcaagatattgaacggttcaaaagtgaatttttacgtcaataaaagtatttaatccagtctcttcatatataaaagtaaatctttctaagtgttgatttaacgcttatcaacaatcattttttataaacaaatatatactcctaaattaacttttaaagcaatgaaaatagtgaacattataactgttgtgtaacagaatgcaattagcatattactgttacacaaattagtacagtttctatgttttgacatacatttgatgaaaattgtacataatttatgtgaaaaaaatcacaacaaacatgctacaatgactatgaaaacgttaacatagcatttcaaattcacaacattatacagatggaggcgtttagtatgttagaaacaaataaaaatcatgcaacagcttggcaaggatttaaaaatggaagatggaacagacacgtagatgtaagagagtttatccaattaaactacactctttatgaaggtaatgattcatttttagcaggaccaacagaagcaacttctaaactttgggaacaagtaatgcagttatcgaaagaagaacgtgaacgtggcggcatgtgggatatggacacgaaagtagcttcaacaatcacatctcatgatgctggttatttagacaaagatttagaaacaattgtaggtgtacaaactgaaaagccattcaaacgttcaatgcaaccattcggtggtattcgtatggcgaaagcagcttgtgaagcttacggttacgaattagacgaagaaactgaaaaaatctttacagattatcgtaaaacacataaccaaggtgtattcgatgcatattctagagaaatgttgaactgccgtaaagcaggtgtaatcactggtttacctgatgcatacggacgtggacgtattatcggtgactatcgtcgtgtagctttatatggtgtagatttcttaatggaagaaaaaatgcacgacttcaacacgatgtctacagaaatgtcagaagatgtaattcgtttacgtgaagaattatcagaacaatatcgtgcattaaaagaattaaaagaacttggacaaaaatatggtttcgatttaagccgtccagcagaaaacttcaaagaagcagttcaatggttatacttagcataccttgctgcaattaaagaacaaaacggtgcagcaatgagtttaggtcgtacatcaacattcttagatatctatgctgaacgtgaccttaaagcaggcgttattactgaaagcgaagttcaagaaattattgaccacttcatcatgaaattacgtattgttaaatttgctcgtacacctgattacaatgaattattctctggagacccaacttgggtaactgaatctatcggtggtgtaggtattgacggacgtccacttgttacgaaaaactcattccgtttcttacactcattagataacttaggtccagctccagaaccaaacttaacagtattatggtcagtacgtttacctgacaacttcaaaacatactgtgcaaaaatgagtattaaaacaagttctatccaatatgaaaatgatgacattatgcgtgaaagctatggcgatgactatggtatcgcatgttgtgtatcagcgatgacaattggtaaacaaatgcaattcttcggtgcacgtgcgaacttagctaaaacattactttacgctatcaatggtggtaaagatgaaaaatctggtgcacaagttggtccaaacttcgaaggtattaacagcgaagtattagaatatgacgaagtattcaagaaatttgatcaaatgatggattggctagcaggtgtttacattaactcattaaatgttattcactacatgcacgataaatacagctatgaacgtattgaaatggcattacatgatacagaaattgtacgtacaatggcaacaggtatcgctggtttatcagtagcagctgactcattatctgcaattaaatatgcacaagttaaaccaattcgtaacgaagaaggtcttgtagtagactttgaaatcgaaggcgacttccctaaatacggtaacaatgacgaccgtgtagatgatattgcagttgatttagtagaacgtttcatgactaaattacgtagtcataaaacatatcgtgattcagaacatacaatgagtgtattaacaattacttcaaacgttgtatacggtaagaaaactggtaacacaccagacggacgtaaagctggcgaaccatttgctccaggtgcaaatccaatgcatggccgtgaccaaaaaggtgcattatcttcattaagttctgtagctaagatcccttacgattgctgtaaagatggtatttcaaatacattcagtatcgtaccaaaatcattaggtaaagaaccagaagatcaaaaccgtaacttaactagtatgttagatggttacgcaatgcaatgtggtcaccacttaaatattaacgtatttaaccgtgaaacattaatagatgcaatggaacatccagaagaatatccacagttaacaatccgtgtatctggttacgctgttaacttcattaaattaacacgtgaacaacaattagatgtaatttctcgtacattccatgaaagtatgtaacaaaatttaaggtgggagcactatgcttaagggacacttacattctgtcgaaagtttaggtactgtcgatggaccgggattaagatatatattatttacacaaggatgcttacttagatgcttgtattgccacaatccagatacttggaaaattagtgagccatcaagagaagtcacagttgatgaaatggtgaatgaaatattaccatacaaaccatactttgatgcatcgggtggcggtgtaacagtcagtggtggcgaaccattgttacaaatgccattcttagaaaaattatttgcagaattaaaagaaaatggtgtgcacacttgcttagacacatcggctggatgtgctaatgatacaaaagcatttcaaaggcattttgaagaattacaaaaacatacagacttgatattattagatataaaacatattgataatgacaaacatattagattgacaggaaagcctaatacacacatccttaacttcgcgcgcaaactgtcagatatgaaacaacctgtatggattcgacatgtccttgtgcctggttattctgatgataaagacgatttaattaaactaggggaatttattaattctcttgataacgtcgaaaagtttgaaattctgccatatcatcagttaggtgttcataagtggaaaacattgggcattgcatatgaattagaagatgtcgaagcgcccgatgatgaagctgttaaagcagcctaccgttatgttaacttcaaagggaaaattcccgttgaattataaatacaattcagaccgaaaagaaagcatatgcaacttcaagagtgaaggggcatatgcttctttttcaattgggtattgagtattagcaagacgtagtaagtatatgagacaacttctacaatggttgaaggaagacgtttttgtaagtagctatgctgataaagaatgtgatgtcttgttaaaggtggggttccaatatcatcatttagctgatgttgaatgggttattatttgctacttgcatatgaatatgagtcttttcaaatttttattgaccctgagtaatgaaaaatattaagatgaaacttaatattaaagcaatgcggagcgtgattatgaagagaattagtaaagatatatgggcagtatttaaattactgtatcaaaataaagggcgttttagcattaatgccttactattgcagttaatcatgatttttattagtagtacatacttaattttactatttaatatgatgttaaaagtagctgggcaaagccaacttacgattaacaattggacggaaatcgttagtcatcccgccagtgtgatacttcttattatattcatattaagtgttgcctttctgatttatgtagagttttcattgttagtttatatggtttatgccggctttgatcgacaaattattacatttaaatccatttttaaaaatgcctttgtaaatgtgcgtaaactcataggtgtaccagttattttctttgttatttatttaatgttaatgatacccattgccaacctaggactaagttcagtattaacaaaaaatatttacatacctaaatttttaacggaagaacttatgaaaacgacgaaaggtataatcatttacggtacctttatgattgctgtatttatattaaactttaaattaatatttacgttaccgttaacgattttaaaccgccagtcgttatttaaaaatatgagactaagttggcaaattacgaagcgaaataagtttcgacttgttatagaaatagttatattggaactcatcattggtgcgattttaacattaattatttcaggagcaacatatcttgctatttgtgtagatgaagaaggagataagtttttagtctcatcaattttatttgttgtattgaaaagcgcattgttcttctattatttatttacgaaattatcattaatcagtgtgttagtactgcacttaaaacaagagaatgtattagaccaaccgggcttagaatttaaatatccaaaaccgaaacggaagtctaggttctttataatttcaatggtgcttgcagtgacatgttttatcggttataacatgtacttactttacaataatactatcaatacaaatatctccattattggccatcgtggtttcgaagataaaggggttgaaaattctattccgtcattgaaagctgctgcaaaagcgaatgtcgaatacgttgagttagatacaattatgacgaaagataaacaatttgttgttagtcatgataacaatttgaaacgtttaacaggtgttaataaaaacatttctgaatctaatttcaaagatgtcgtcggtttgaaaatgcgtcaaaatggacatgaagcaaaacttgtatccttagacgaatttattgaaacggctaaacaatcaaatgtgaagctactagttgagttaaagccacatggtaaagaaccagcagattatacacaacgtgttattgatattttgaaaaagcatggtgttgaacatcaatatcgtgtgatgtctttggattatgatgtgatgactaagttgaaaaaagaagcgccatatctcaagtgtggttatatcattccgttgcagtttggtcattttaaagaaacatcattagatttctttgtcatcgaagatttttcttattcgccaagacttgttaatcaagcgcacttggaaaataaagaagtctatacttggactattaatggcgaagaagatttaacgaaatacttacaaaccaatgttgatggtattatcacagatgacccagcattagctgatcagattaaagaagaaaagaaagacgaaacatacttcgatcgttctataagaattttgtttgaataatataaacaaagacctctaaagttattaagatgataccttcagaggtctttttaatgttgccatctatgggataggcaatcgtttcattcgtttatattcatatgacaagtatttgtatggcaatttggcgtcacaaacacttacatgatttattggtgaattattaattgttttgtgaatgcaaagggttagaaattgaattgtaaatactttctaatctttgtttcgctttagtcatttgatccaaatttttagtgcgtatagcggattttgcaatatagtgcgcagctaaaatatcgcgtttttgaaacgcatctaaatttaggtacgataatttatttaagtcagtgtttgctattaattcatgtaattgatctacaagcgcttgatgttgatacgtatgtgatgtagtttcaggtttgcttgctaatttaataccagtcgtatcaaggagcgccgctttaataccagcaactaaatatgttttgattttcatttgtgttgtcatgctttgttactcctttgatgtacattaatcaaaaaaattatacactattgtatattgcaaagctaattaactataacaaaaagatagttaatgctttgtttattctagttaatatatagttaatgtcttttaatattttgtttctttaatgtagattgggcaattacattttggaggaattaaaaaattatgaaaaagcaaataatttcgctaggcgcattagcagttgcatctagcttatttacatgggataacaaagcagatgcgatagtaacaaaggattatagtaaagaatcaagagtgaaagaagagagtaaatatgattcgccaatgtcaaattggtattattggggaaaggttaaatccttggagtcacaatttgcagatgcgatagatattatagaagattatcaatatggggaaaaagagtataaagacgccaaagacaaattgatgactagggtattaggtgaagaccaatacttattaaagaaaaaaatagatgaatataaacaatatagagaaagatatttaaaagctggtttaagcccggtgaaattttatgattataacctttatgattttacaatgaaagaatataatgatatccatcactctctaaaaggtgcagtggaagagttctataaagaagttaaacatattcaatcaaagaattcggatttacaaacttatgacaagaaaactgaagatgaagaaactgataaagtatattcattagttagtgaaattgatactcttgttgtaacatattatggagataaggattatggggagcacgctaaagagttgagagctaagctagatattattcttggagaagaaaaaaagcccaatagaataactaatgaacgtattagaaaagaaatgaccgatgatttaaattctattatcgatgacttctttatggaaactggacaaaacagaccggttaaaatcactaaatataatccaaatattcatagtcctaaagataacaaagaaaacttcgatgctttagttaaagaaacaagagaagcagttgaaaaagcagatgattcttggaaaaagaaaactgtcaaaaaatacggagaaactgaaacaaaatcgccagtagtaaaagaagagaagaaagttgaagaacctcaagcacctaaagttgataaccaacaagaagttaaaactactgctggtaaagctgaagaaacaacacaaccagtggcacagccattagtaaaaattccacaaggaacaatctatggtgaaactgtaaaaggtccagactatccaactatggaaaataaaacgttacaaggtgtaattgttcaaggtccagatttcccaacaatggaacaaagcggcccatcattaagcaataattatacaaacccaccgttaacgaaccctattttagaaggtcttgaaggtagctcatctaaacttgaaataaaaccacaaggtactgaatcaacgttaaaaggtactcaaggagaatcaagtgatattgaagttaaacctcaagcaactgaaacaacagaagcttctcaatatggtccgagaccgcaatttaacaaaacacctaaatatgttaaatatagagatgctggtacaggtatccgtgaatacaacgatggaacatttggatatgaagcgagaccaagattcaataagccatcagaaacaaacgcatacaacgtaacgacaaatcaagatggcacagtaacatatggcgctcgtccaacacaaaacaagccaagtaaaacgaacgcatataacgtaacaacacatgcaaacggccaagtatcatatggcgctcgcccaacacaaaacaagccaagcaaaacaaatgcatacaacgtaacaacacatgcaaatggtcaagtatcatatggcgctcgcccgacacaaaacaagccaagcaaaacaaatgcatataacgtaacaacacatgcaaatggtcaagtatcatacggagctcgcccgacatacaagaagccaagcgaaacaaatgcatacaacgtaacaacacatgcaaatggtcaagtatcatatggcgctcgcccgacacaaaacaagccaagcgaaacaaacgcatataatgtaacaacacatgcagatggtactgcgacatatgggcctagagtaacaaaataagtttgtaactctatccaaagacatacaagtcaatacaaaacattacgtatctttacaacagtaatcatgcattctatgatgcttctaactgaattaaagcatcgaacaatcgaaagcatatttctaaattatttattcattatagtattaaacataacatgacctaatatattactaacctattaaaataaaccacgcacatctaagtgatatacgacaatcacagcaataataattgctttagaaagtcgtgccgaactggaacttacaagtctagttcgaacacacactgatgtgagtggttttctttattttaaacatgaacaatcagataagttactagcattagcaaatattattaaatcaaagggcttcgattcataaaatttaaaacaatgattaaaattagacgtgtaaatgttaaattctaaaacggaaataaccaccatcccattaaaccacttttttgttcaatcactatatttcacacagcttcattaataaaacgaaattgcttcaacccgcttcaacttcaatctgcttcaacttcagcctacttcattcaataaccaaacgaatccgcttcatccaaaatcaaccattctaacgcacatattcaaatatagcagctgcacccataccgacaccaatacacatcgtaaccatgccgtaacggctatcgggacgtctacccatttcattaagtaaacgcgcggttaacattgcgcctgtagcacctaatggatgacctaaagcaatagcgccaccattcacattcgtacgtgatatatctagacctacttctttaatagatgcaatcgtttgagaagcaaatgcttcgttcaattcgatcaaatcaatgtcttcaacagatagattgctgagtgacaatacttcaggaatcgcatatgcaggcccaatacccataattttcgggtcaacgcctactgccttataaccaacgaatcgtgcaataggtgtcacgcctagttctttcactttatctccagacattaaaactacaaatcctgcaccatcagaaagtggggcagatgttcccgcagtcacagtgccgtcagctttaaatactgtacgtaatttggctaatgcgtccatcgtggtgtcagggcgtataaattcatcttggtcaaagatatttgtgtgtacttttggtcctgcgtttgtatattcaactgagtttacttgtattgggataatttcatcgttgaaccgaccatcacgttgtgcgtcataggcacgttgatgacttctgacagcataagcatcttgatcttcgcgtgatacgtcaaattgggatgctacattttcagcagttaaacccataggatatgacgcacctatatcatcatattgtaaggttggattgtttgtgggctcgttgccacccattggtacggcactcatcaattcaacgccaccagctacaagtatatctccttgaccagccataatttgattggctgcaatcgcgatggtttgtaatcctgatgagcagtagcgattcactgtttgacccggtaccgtgtcagataatcccgtacgcaatgcaatcgttcgtgcaatgttttgtccttgtaatccttctggaaaagccgtaccaacaatgacatcttcaatcatattcttattgaattttccgtcaatacgtttcaatacgccttgtaatactttggctgcgacatcatcaggtctttcgtggaataatgcgccttgctttgctttcgctgcggctgaacgcccataagctacaatgtatgcttcttgcatggttatcatcctctcttaatgactatcttttaattacgtaatggcttaccagtttttaacatatgtgcaattctttcatatgattttttagattttagtaagtcaataaagccaattttctccaacgattgaatgtaacgttgattgataaatgtatttcttggtaaatcaccacccgctaaaattgtggagatatttaaggcgatatgataatcatggtcgctaataaaatgaccccgtctttgcgcatctaattgtccttggatcaatgctttgaagtcttcgcctaaagcgatatattgatgtctaggattcggaatatagtttgtttctgcttcatatttcgcacgtttgagcgcaacttcgacacgttgtgctgtattgaaaataatcgtatctgtatcacgtaaataaccataacgacgtgcctcaaaggcatttgtagagactttcgcaaatgcgatattcgtcagtacttttgtcatggaagcttgtttgtcatcaaacttatgcgatgtgcgtaatatgcgatcagccatttctgcaaggccaccgccactcggtaataagccaacgcctgcttcaacaagaccgatatacgtttcacttgcagcgacaacaataggtgagtaaagtacaagctcacagccaccgcctaaggcacgaccttgaacagctgtgactactggtttcaaactatacttcaaacgattaaagctataatgtaatttatcaattgattgtgcaacgacatcatctacaagaccgtcttcatgcgcctttttcattaagaaaaggttagcacccacactgaaattattaccatctgcataaatgaccatacttgtgtaatgttcattttccagtaaatcaatggcatcaactaacgcatcgttgaattcatcggtaatgacattatttttactttgtaatttcagtaacagttgatcatcatgagttacggaaagtttggcatcacctttatcccaaagttcatcttttacgaagtgagaaacaggtgttgcatattcgatggtctcatcttgtttataaaagccaccatctaaatcactaatccattgtggtaagtctccaagttcttcttccatacgtgttttaacacgttcatatcccattgcatcccataattggaatggaccaagtttccagttgaacccccagacaagcgcacggtctatgtctcggaaatcatcagtagctttaggtacattgatagcagagtaatagaaattattacgtaatgtctcccataaaaatagtcccgcttcgtcttgcgcattgaatatgacatcaagattatgcactaagtctttattaaattcatttaaaattggtaattgtggttgcgatacaggtacataatcttgtttttcaacatcgtaaacaagtcgagttttagtttctttatcctttttgtaaaatccttgtttcgttttacgtccgagtgcgccattttcaaacaacgtatttacaattttgacctcatgaaaataaggtgtttcttcaggtacttgttgcatgcctttaattacagacactgcaatatctaaaccgactaggtcagatagtgcatatgtacctgttttaggacgaccaatcgcttgtccagttaaagcatccacatctacaatgcttaacttgtgttgctcggcgcgatacataatatcattcattgtttgcgtgccgaccctatttgcgacaaagccaggcacatcattgacgacaatgacacctttacctaacacgttttgcgcgaaattttttacatctaatataatagattccttcgtgtgtgacgtaggtattaactccactaatttcataatacgtggtgggttaaagaaatgtagaccaaagaatcgttcttgatccttctcgttaaatgcttgagcaatcgcattaattggaatacctgatgtatttgtagcgaataaagcatcttctttagcatgttgtagaacttgttgccaaacagcatgcttaatttcaatatcttctttgactgcttcgatatataaatcagcatcatcatttaccaagtcatcatcaaaattaccatatgttaaatgactcgctagatttaagtcgaatagtagcggccgtttcttatctgtaattttatcgtaagattttttcgcaatgagatttggatcgtttttgtccactacaatatctaatagttttactttaagtccagcattcacaaaaagtgctgccagttgagcgcccattgtgcctgcgccaagaacggttactttattaattgtcatagtgattcctccaatttagttgaggataagataaccattaagataattggaataacgttgctattttataaaattaattaagtatctttgacagtcatcttagcctcttatttaaggaaaaagctttatgcttaaaataagtcttttttagtgaaattaatgcatctcatataattatttgctatttatacgaaagcagaatctccagtcaaagcgcgtccaattactaaggcattaatttcatgtgtaccttcgtacgtgtaaatcgcttctgcatcagagaagaaacgtgcaatatcataatcgtcagctagtatgccattaccacctgtaataccgcggcccatagctactgtctcacgcaaacgtaaggcattcatcatcttcgccgttgaagttgcaacctcgtcatattcaccatgtgcttgcatagttgctaattgagcacatgttgccattgcttgagctaaattaccttgcatcattgctagcttttcttgtattaactgatatttactaattggtttgccaaattgcttacgctcagtgacataatctaatgtggcacgtaaagcgccagccataccacctgtagccatataagcaacgcctgctctcgttgaataaagaattttggcaatatctttaaagcttgttatgttttgtaagcgatccgcttcatctactttgacattagttaatttaattagtgcgttaggaacaatgcgaagtgcgattttattatcaatgacttcaatatcgacgccatcttgttctggtctgactacaaagcaatggggtttgccagtttctttatttactgcgaatactggaatgacatcagatacatgtgcaccaccaatccatttcttttcaccattgataacccaagtatcgccttggcgttcagcgattgtttcaagacctcccgcaacgtccgaaccgtgttctggttcagttaaagcaaaacatgtacgcagttcatgtgactgtaatttaggtacatatttcgcaatttgttctttgctacctccgaaatagaaagtgttatgccctaaaccttggtgaacaccgagtagggtagctaaggaaatatcaaatcgcgcgagtaggtaagacatgaaaaactgaaatagttgactaggcattttggcgtttggacgatccttgtaaagtaatggattgttaaaataatttaattctcccagatctttaaaatagtcctcgggtacagtagcgtctatccaatgttgattaatattttcacggtacttactttctagcaatgaatctacttgttgtaaaaattcgacttcaccgtctgttaaacctttagcaatactaagtacatcttcaggaaataatgtttttaagaccgtttctttttcaaatgccatataaattcctcctaaaaataatatgaatactaatgtgaaatgcatttaattcaaaaacaacacgctttatttgtaaacgcttacactgaatatcaaaaatttttatcacctttaaagtgtttgtgagactttgtcattcatcatttgtcgaatcgcaagtttatctggtttctgcgtactgtttaacggcatatgtgtcactggtacatacattcttgggactttataacctgctaaacgacttcgcatatgttgatctaaaattttagcgtaatgaggttcatcttcgcgaagtataatggctgcagcaattgattcaccatattttggatgatcatagccaacgaccacacaccggtctactagtggatgctcagctaaagcattttcgacttcggatggtaagacattttcgccaccagttatgattaattcttttttgcggtcaataataaatatatcgccatcgtcgtccatcttcgctaagtcaccagttaataaataacgaccatgaaatgctttggcagtctctgctggtttattccaatatcctggcgtgacatttttagccttaattgcaagttcgccaatctcaccagtaggtacttcctcaccgttatcatcaaggatacgtgcatcaacgaacatgactgctttaccaatactcattggcttacgttttgaattttccggtgtattaacaagtacaagaggtgcttcagttaaaccatagccgttaataatgtttatgccatattgtttaaaagctgcttggatacttggtaatggttgtgaaccaccttggatgatataatccatagctttaaaattttcaggattaaaattactagcacgtagcgtactataatacattgtcggaatcatgataataaatgtagggtgatattgtgcaatcatgtcattcaattcttcgccgttaaagtaacgttgaagaataagtgtgccacctgacattaatactggtaatacagtatcgttaaaccctaaaacatggaacattggtgttgatacaatcgtaatatagtttgaattgaacttatacgtcagctctaagtttgcaccgttatgaacaaatgattcatatgagaacatcacacctttaggtgatccggttgtaccacttgtataaattaatgctgcaagatcttgtggttcaacaggtgttgcttgaaaaggttggtgataatctggatttacgatttcatcatattgcgccacatcaatatccatatgcaataagttttggtcaatatcggtgagtgaacttaaatgtttttcagcatagaagagcagttttaattgtgcatcttccacaatggctgcaatttcttttgggttaagccgccaattcaatggtaaaaaaaccgcacctgttttaaaacaagcaaataataaatctaatattgcaatatcatttggcgcaaagataccgataacatcgccttttttaacaccttgagatgttaaataatgtgccatattatcagcacgtgcattgagttgttggtatgtccaagatgtttgttttgcgtgatcaataacggcaggcttgtcatcatcgaagtctgaacgcgtttttatccaatcgaaattcattagtataccccctttagcttcactttcatactttatgaattgattgtttaagttgtccccatttttctttgtaaatgctggtatcaattaattttaaatgatcagcaataattggtttaaaagccatttgattcaaaatatctttatgcaaatcaagacctggtgcaatttcaattagtttcaagccttgattggtgagctcgaatactgcacgatcagtaacaaaatagacttcttgctcgagtgattgtgaatattgtgcattaaagtcgatatggctcacatctgatacaaatttctggttttgtccttcagtttcaatgtttaatcgttgattatgacatgagacatgactgccagctacaaaagtacctgaaaagataattttatttacagattgcgtaatgtctataaagccgccacatccatttagtcggtcattgaagtaagacacgttgacattgccgtattgatcaacctcagcaaagctaagataggcaactgatacaccattgttataaataaaatcccatgctcgatcatgaggcatgcgcacatctgcattgtaattcataccaaaatgttcacgactaccaacgaatccaccgaaaatgccaacatctaaaatcggttgcacatcatgttcaacacattcttcatgcaataaattagagagttcattattgatgccataaccgatgctaattgtatcgccataagttaaaaactgagcagcacgtcggagaatcaatttgcgactattaaaaggtaatgcgggttcaggtattccatcaattcgttcttctccagacaaggctggtaaataatgactttgaattacttggcggtgattcttttcatcttctgtgacgtatacataatcgacaagatttcctgggataacaacttcattcggttttagttgatagtcgtcaactaaagctttaacttgtacaataactttcccatgattggctttcgcgtttaatgcgacatgataacactcgctcaagtacgcttcttgagttaaataaatgttaccttgttgatctgcgtatgttcctctcagtagtgccacatcaacgctagggaatgtgtaatgtaagtatgtttcatcgttgatggttactaatgaaaccaaatcatcagttgttcgtgtatttactttaccgccaccgtatctaggatcaacagctgtgtttaatccgattttagtaataactccaggtaataattgattactctgacgataatgagttgcaatgataccttgtggtaaaaaataagcttcaatgtcattatttttcattgcttgtgccgttttggaagaagccgttaaaatactcataatgacacgtttaatcatgcgacgttctataaaatcatctaaatccggtgcggcacctaaactatggatatcattcgctaatataaacgttaaatcattgggcgtatgatatgtgtcatgttgcgctaacacagcacgtagaacttcggcgggtaagttggctacagctaatgctggtaaaccaatcacatcaccatctttaatgatatgttgtaagtcgtgccatgtgatttgtttcaagcaagtcacctccatcacatttgataaaatatagcgtttttacactttgtgtaaacccttacaagaaatataacataacgacgtttaaaatcaattagaaatatctttttattctgataatagacacagtatagacacattttgatggtcgataacaattgtaatatcaagggtttgtaatgaattgaatatcattaaaatacttatataaaaatattgttcggaatataaaaagttaaataggttttgatttttaaatatgaaatacaaagtgcccaatcgaacaaagtatttatattaaaatatggaaaatccatcaatattaaattaaaatagttttattatgaaaagtgaaagtaggtaagtctatggaaggtcttaatcatcgaagaaatacagaaaaagaagagacaacacaaacgcaatcagttgcacctaatacaggtgaagaggggatgtcatcagcaagtacacaatcaactaagacgtccgacatacataatgaatctatcaataaacaaatggaagccaaagcgcatgaaacagcgcaaaatgcagatttaaaaaccgaagcaagaagtttatttgataatgcaaccaaatcaatcggtagactagccggcaatgatgaaagcttaaatcttaatttaaaagatatgttttctgaagtatttaagccgcatactaaaaacgaagcagatgaaatatttatagcaggtactgctaaaactacgccagcaatttgtgacatatcagaagaatgggggaagccatggctattttctcgagtattcatcgctttcacagtaacatttattggattatgggtcatggcagcaatttttaataacactaacgcgattccggggctcatttttataggggctttaacagtaccattatcgggtttgttcttcttttatgaatcaaatgcgtttaaaaatattagcatttttgaagttattatcatgttctttattggcggcgtattttcattactaagtacgatggtattatatagatttgtcgtttttagtgatcaattcgaaaggtttggttctttaacatttttcgatgcatttttagtaggattagttgaagaaactggaaaagcactcattattgtttatttcgtcaataaattgaaaacaaataagattttgaatggattattaatcggtgctgctattggtgcagggttcgcagtttttgaatcagcaggttatattttgaatttcgctttaggagaaaatgtcccattattagatattgtcttcacacgtgcgtggactgcgattggtggtcatttagtttggtcagcgattgttggtgctgcaatagttattgcgaaagaacagcatggctttgaattcaaagatatttttgataaacgctttttaatattctttttatcagctgttggtttacatggcatttgggatacatcattaactgtacttggcagtgatacgttgaaaatatttattttaatcgttattgtgtggatacttgtattcattttaatgggggcaggtttaaaacaagtgaatttactgcagaaagaatttaaagaacaacagaaaaaagtagacgaataataattaaagcttatgttgctcatatgtttgtgacataagctatttttataatttgtctttaaaagagtggaataggaatacttttcggagttaaaaaagtgtttcacgttaaacaaatagtgacaattagatttatataaaatgaacatgattcactgaaagtatgtaataatcattttattgaaattcatcaaacagaaattaatacaatcatataagcaaattaaaccacgccataatcatattggatgacttcggcgtggtttttatagttgaagcagggctgagacataaatcaatgtcccacactcccttatcgttcaatcgttgttcgataatcgattaaatagataccttcaggtgttactttataatttttaaccttagagttagcagcgactatttgatcgttgtaagcaatataactgtgtggtacatctcgacttgataatttaataatatcattagaaatattgtgacgttccttaacatctacagtatgattcaattgattaattaaatcatcgacgttgctattattgtagtctcctttattaatagcaccatcttttttatatgcttgattaaagaaatagcctgtatctccacgaggaattgttccgaaactatacatcgttgcatcccatgcagaacggtcttttaagtaaccttctatgtcatcaacacttttaatgtcgatttcaatatttgcttttttagcatctgattgtaatacttgcgcaattttcgatagctctggacgaccgtcatacgtaattaacttaatttttaaagggtgttcttttgtataaccatctttagctaataacatttttgcttgttcgatattttgtttggttaacttaggttctttaatatatggaattttatcattaaatggactcgttgcaggtttcgcataaccttgataaatatgatctgcaataccttgtctatcaatgatatgatctaatgcttcacgaacggatttagtcatttttttattagtatgattatacataagtaaagaagttctaaatccagattcttttgacacttttaaattttgattattttctatgtcttgaactttattaactgggacatcagttattaaatcatctttttgagattctaaatttctgacgcgattattgccgtcttcttggtacgtcacagtaatatgatcaagtttcggtttaccttgccaatagtccttaaaattcgacaatgatatttttcgagattgcttataatcttttatttggtaagggcctgtaccaacaggagtttgattaacatctgatttagcatctgtatcataaattgccataaaaggattagctaattcagatacaagttcagggtaagcggagttggttttaattgtcagtttttgacctttagcggtaattgatgatattggtaatgaatatttgaccaagtcgctttttttcatgctattttcaaggctagatttcactttttctgcagtcaatttttgaccgttttgaaatttaatattatcttttaattctatatctaacgttgtatcatttggttgatgatacgatttcactaatgctttttctatttttccttgatcatttgttttaaataatgattctgcagcaccaatcttaactggtacatctgtttcataaggtgcaatagactttgtttttaacggtaacgaaatatttaagtctttgccagatgaatgcattgagccacatcctgataacactaatactgctgaaaatatagttgctagtcttttaaacttcatttcattaacactctctttctaattactatgtaaaacccaacaattaatattttaaaacttcattttgttaaagtaaaatgttgttcaagtttagtaatcattaaagttcaattaattgtagtaattatgctttttaaaaataaatattagaaatgaagttagcgacatttatagtgattcacgataaacatatatacctaagtattgagcaactgctgtagtactacagcttggttatgtttagtatcttttgctgcatataacaatagaacatgattatgctgatttacaatatcctttaatttttcaaaagcatctttttgtgcatcctgatcacgtaattctttttcatatttttctttaaaagctccaaaaagtttaggatcatgttggaaccattgtcgcaactcagtagaaggggcaatgtcttttaaccaataatctaggttagcagttcttttcgaaatacctctcggccagactctatcgactaggatacgaatagcgtcggtattatctttattgtcataaatccgtccaatatctacggtcatcttgtgaactcctttcttatgaaattcagtgagcatacatcaatgcatgttgtggtgggacgacgaaataaattttgcgaaaatctcattactgtcccactcccaattaaaaaactgccatgacaaagtaaagtcatagctgtttttgtatatatgttatttatttttacgtttagttaaatacttcaaaccaactgcaaagaccgtgtacccggctatggtttgtatcaatgttttaattaaattattatttttaacaataatatttgcagtaacaatacttacgaaatataatgcaaatacttttacgtaacgttgattaagtttcatatgagcactaaacctcttttctcagttatactgcaacgcttagtcttggaataaatgtttcgtagtgtacgcgatccatatcgtaatttaaagatttaagtgcttcgatcatagattgtaagaattttgtaccaccacagatataaatttcaggtttatttgctaaaaatgcttgtaattcttcagcgccaatatagccttgtttatcttttaagtgtgtatataatttagcgttgtcatgatggcttgcgatactgttgaagttgtctttgaaaggtaaatgttgttcattttcagcaacttgaaccatctgtgtatctaaacctttggcagaggcagcttcatacatagctactaaaggtgtaacaccaatacctgaacctaagaaaagttgtggttcagtcgtattctctaatacgaatccacctacaggcgcagctaaattaatcatatcgccttctttaatctcatcgtgtaaaattgttgaaacttcgccttcatgttctgttgtgacatcacgtttaacgccaaaagttaaatggtttttttcacctgatacgatagaatagtgacgtttagctctatatggaagtttatcactagaaacatcaactgtgatgtattggcctggtgtaaattcactaaagtcatattcttcagtttcaactgtaaatgatttaatgtcttcagattcttgtttaatattggtaattttgaatggtttaaaaccaatccacatcatttgatcataaatttctttttcaatttggatgaacacatccgcaataacgccatatgcttttgcccaagcttgaatgacagggtcattttcttctaatcctgtcacgtcttgaatggcttttaataaattttcccccacaattggataatgttcagcataaacttgtagtgcgcagtgtttatatgcgactggcataatgactggtttaataacacttaagttatcgatattaaccgctgcggccattacagcttgtgctaatgctgaagattgcatgcctcgtttttggttcgtttgattaaacatgtttaaaagttcaggatgcgctttaaacatttttggataaaagattgacgtaatttctgtccctttctctttaagtaaaggcactgtttgtttgataatgtctttctcttgttctgtaagcatgatactcctcctttaatctgtctattttgattattctactaaaaatttcgatattcaattaattagtttgagaaaatataaataaaatggcaaatttgataattgtatgacatttttaattttttaaatacttatcaataagcgttgtgtacaattgtctgtttgcacaccgacgattgcgcgcatttatttgactaattcaaaaaacattgttgctttcttagaataaagtaaacatgataataaaaatgtgaaagtgtaaataatcactggcgaagtacgaagactaaagacatctaagatgtaatcgtatacaaattaaaaaggtgtaaaaattaaaataaaatgtgaaataaatcacaatttaatattgacccagtacttaatgcatgttacattttatatgtgaaataaatcacaaacttaaaagtggatgacacatgaccttttaagttatgcgttgaaaataaaagagatgtttatttgcttttgtatcgtcaataagcagcattaaactaacatatttgaagctacacgtatgttagtgaattaatcataagggagtttttgtaatgaacaaatttaaagggaacaaagttgtattaataggtaatggtgcagtaggttcaagctacgcattttcattagtgaaccaaagcattgttgatgaattagtcatcattgatttagacactgaaaaagttcgaggagatgttatggatttaaaacatgccacaccatattctccaacaacagttcgtgtgaaagctggcgaatacagtgattgtcatgatgcggatctagttgtcatctgtgctggtgctgcacaaaaacctggagaaacacgtttagatttagtatctaaaaacttgaaaatattcaaatcaattgttggtgaagtaatggcatcaaaatttgatggtattttcttggtagctacaaatcctgttgatattttagcgtatgcaacatggaaattctctggtttacctaaagaacgtgttataggttctggtacaattttagactctgcacgctttagattattgttaagcgaagcgttcgatgttgcgccacgtagcgtcgatgctcaaattattggtgaacatggtgacactgaattaccagtatggtcacacgctaatattgcgggtcaacctttgaagacattacttgaacaacgtcctgagggcaaagcgcaaattgaacaaatttttgttcaaacacgtgatgcagcatatgacattattcaagctaaaggtgccacttattatggtgttgcaatgggattagctagaattactgaagcgattttcagaaatgaagatgccgtattgactgtatcagcattattagaaggcgaatatgatgaagaagatgtttatattggtgttccagcagtcatcaatagaaacggtattcgcaacgtcgtagaaatcccattaaacgacgaagaacaaagcaagttcgcacattcagctaaaacattaaaagatattatggctgaagcagaagaacttaaataactttttaaaaaatctataccattccaaaaattgtaaaaccttacccaaaaaattgtataaagggctatttgatacaactatatgtgtcgagtagccctatttttaatgtagtgaaagtcgttgttgaaattaaattcaaatctggcacttaagctttaatcatagcattaagatgattgtctagcagaggcgatttgcgggctcactacagtgtatgatgaacttaatgcttcaaatgtaacattaaaaataaaagcaacgatgtcacttcttacttcgtacatcgttgccattagttctgttgatatttcggttagtcttaatccccgagcaattcttcaatttcatttttgataactgtaacgtgaggcccataaattacttgcacaccagtgccttgctggattacacctttggcaccagtactttcgagtaatactttatcgactttgtcattttgatgaagtgtgacgcgtagtctcgttgcacaacagtcaacgatttcaatgttatctttgcctcccaaaccagcaacaatagtttgtgctctttcagtagcctcaacttgttgtgctgcagctttatcttctcgaccaggtgttttgaaattaaatttcgtaattaagaatctgaaaacgatgtaatacaaacagaaccacacaattccaataggtatgacgtataggtagtttgttttactattaccttgtagcacaccaaaaagtaagaaatcgataaagcctccactgaaggtttgaccaattgtaatgttgaaaatgtctgccatcataaatgctaatccatcaaagaaggcatggattacataaagaataggtgcgacaaacaagaaactaaactctaaaggttcggtaatacctgttaaaaatgaagtgagtgcagcggataacattaaaccgccgacaacttttttatgttcaggtttagctgtgtgataaattgcaagtgcggcaccacataagccgaacatcatcgtaataaaacggcctgacataaagcgtgacacacctgaataatacttcgtcacatctggatcaccaagttgagcaaagaagatgttctgcgtaccttgaactaagtgccctttgacttccaaagtaccaccaagtgccgtctgccaaaacggtaagtaaaaaatatgatgtaaaccgagtggacctaacaatcttaagatgaagccataaacaaaagtaccgatggcacctgttttcgttacaaatccaccaacatgataaatgccggcttgtatgcttggccaaatgaaaaacatcaatacacctaaaaagattgcggcaaatgctgtgacaatagggacaaatctagagccaccaaagaaacctaaatacggtggtaatactactttgtgatatttgttgtgaagtattgcggtcataatacctgtgataatcccgccaaaaacaccggtttcaaccgtttgtataccgagcaccatgccttgtccattttgtgcaagctgatcttttgccaatgtgcccgtgatagttaataagccattcatagttgcgttcataattaagaaaccgagtagtgcagctaaacctgcagtacctttatcgcttctagataatccgattgcgacaccaattgcaaagatgactggtaaattttggaaaacaatactacctgcagctgacattaatgtaaaaatattttgtaataaggtaatatctaaaatagggtatgctttaacggtgtttggattacttaatgcaccaccgatacccaacaatagacctgcagctggtaagattgcgataggtagcataaaggacttgccgaactgctgtgctttttcaaataaagatttcatcaacatccctcctaattattctcaatatagcttttgagaaatttaatatcaatatatattctgtgtatgaaaatatttttcataaaaattgtttgaatcatgtaacaatcatataaattgctgtttatattgttgtgaaaatgagttgacaaaagtcggtatagatatgtagacatcctatttttagcgaggtaggttgataaggcatatcggataaatttataagccataaaatagataaatagtgtttgtatccaaaaatatgagaaagttaaaactatttttcaaaataaacatgattcaccacataaataaatatacataagctatcgataacaacttaagaaaggtggatatataaatgaaaagaaagattattatggattgtgatccaggacacgatgatgcaatagcattaattttagcgggggcaattgacagtccactagagatattagctgtaacaacagtcgcaggtaatcaatcagttgacaagaatacgacaaacgccttgaacgtattggatattatgggacgccaagatatagcagtagcgaaaggtgcggataggccgttaattaaaccagctgcctttgcttctgaaatacatggggaatctggattagatggtccgaaactaccgtcgacaccatcacgtcaagcagttgcaatgccagcatcagatgtgattataaacaaagtgatgacgagtgatacacctgtaacaattgtagcgacaggtcctcttacgaatgtagcaacggcattgattcgtgagccaagaatcgctgagcatattgaatctattactttgatgggtggtggtacatttggaaattggacgcctacagcagaattcaatatttgggtagatgctgaagcagcgaagcgtgtttttgaaagtgggattactataaatgtgtttggtttagatgtaacacatcaagttttagccgacaatcacgtgattgaacgctttgaaagtatcaataatcctgttgcacagttcgtcgtagaattattgcaattctttaagaagacatacaagactcactttaatatggatggtggtccaatacatgatgcttgtacaattttgtatttgttacaaccagaattgtttacaatggtacccgttaatatcgacattgaacatcaaagtccactaacttatggcactatggctgtcgatttaaatcatgttacaggtaagcctgccaatgcttattttgctacagcagttgatgttgaagaagtgtggaacttgatagaccataagttacgtacatacgaataataatacttaattaaatagatacagttaaccctaaggcgcctgatataagcgtccttagggtttttgtagtggattacattggtcatgacaatttgataatgattgagatatgtatgttaaaaatgcttcaaaaagcataaaacacaaaaatatatgtaaaaatttcaattgctttattttaaaagattaaaatcacaaaaaatatagatataattgaaatgttgttaaaacatcacaatgatgtacatgctcattttgaaaatatgtgttcaaagtgtgtacatcggtgtgacgattgatgataaattgagctcagatgctcaaaggaggatcgaacatgaacggggataatcagcaaatactcagagaaattgtattgaatcctactattcatggtaaagaacttgaatcgatatttggtttgtctcgtagacaactaggatatcgcattcaaaaaatcaatttgtggcttgaacaagagggttatccaaaacttgaaagaacaagccaaggaaattttattgtaagttctgagatcatgacgttattcaagcgagatgtatcggagcagcaaatgttaaacggcaacaatgtcatttttagcatagaaacacgtcgttattatttaatgctcatgctttttagtaaggaaaatgcaatgtctctaaaccatttttcaattgatttacaagtcagtaaaaatactgtcattcacgatataaatcatgtgaaagagcaattggaagatcatggtttgtcacttaagtattctcgaaagcatggttatgaaattgttggtgatgaatttgaagttcgccgtttcttcattaagttgattgatcaaaggttgaatcatgatattactaaaagtgaagttttaaaggcgctcaacttaacattcgaagatatcgcatatcaaaaagacaagatcaaacaggtagaacaatttttgaagagtcgctttatagacaaatcacttagttcattgccttatgtcctttgtgtgattcgtagacgaattcaaagtggtcatgtgatgaatccattaaatattaattatcagtatttgagggatacgaaagaatatcaagcaacggagattatgacgcaacatgagccggatttgccagaagcggaaaagttatatttgacattacacttactttcaacaagtgtgcaatggactgatttgcaagaatcagatagcatatcgaatttaacgatggccatcgctcaaatgattcaccattttgaacaaatcacttttattaacattgaagataaggagaaattatcacagcaactcttgttacatttaacgcctgctttttataggattaaatataacttaacggatcgtgatgaattaataaatcctttacaaggaaattatcaatccttatttcatatggtgaaacaatcatgccaatcgttaactgaatatttcggaaaatcgttgcctgataatgaaatagcatatttaaccatgttgttcggaggtagtttgagacgtcaagatgaaaacttcgatggcaagataaaagctattatcgtgtgtacacaaggcacgtcagtatcacaaatgatgttatacgagttgcgaaacttatttccagaaattattttcttagatgcgatttcacttagaacatttgaaaattacacattagattatgacatcgtcttttcaccaatgtttgtcctaacacataaaaaattatttatcacaaaagtagctttatctgaaaatgagcaacgaaagttacgtaaagaagtgatgaagtacattaataaagaatcggctgacattgataaggaaataaacaagttaatggcattaattgaacgcacaacgacagttaatgacattacagaactacgtgatggtttagaagattttattgcgaattataattcaatttcaaccattaatggatcgattgtcacacaaaataagacattagatttagctgacttgataccagcaaggcacgtgaaaagaatacatcatgttgaaaatattgatgaagctattgctaaagcaagtgatgtgttagttgctaatcattttattgatattaaatatattcatgagatgcaacaggtatttgatgattcgtatatggttatcatgcaaaatattgctattccacatgcatactctgaaaagcatgtacataaaacggcgatgagtatgttgatattacaagaaccaatatacatgtcagatggcacagcaatccatattattgtacctattgctgctgttgataaagtgacacacttaagagcgttactacaattgagagatgtggcgcaagacaatgacgcaattaagcgcatcatacaaagtcgcaaaaattctgatgtaaatgagattttaaaaaattattcaaataaagaagcgagggaaaatggatgggacagcaattagtgcataaagaaaatataatgctcaatttgtcggcaactgataaagaatccgtattgtcacaaatgtcagatgtgttatttcaaaatgggttcgtgaagtcaacgtttaaagatgcagtcatcgacagagaaaaagaatttgctactggtttaccaacgcatctatgttcggtcgctataccgcatacagatgtcgaacatattaaccatagaacgataggtgtggctgttctagaaaaagaagtgccgtttattgaaatgggaacacttgatcaacagacagaagtgaaaatcgtttttatgttagcaatggataaagtagatgatcaacttaagctgttacaacagttgatgcaaatttttcaaagtgaagaaaaattggagcagattctacgaacgaaagatgaaacaattttagcaacactaatcaatgattatttggaatataactaaaaattaattggaggaattgaaaatgaaacaagtattagtagcgtgtggtgcaggtattgcaacgtcaacagtagtaaataatgcaattgaagaaatggcaaaggaacacaatattaaagtagatattaaacaaatcaaaattacagaagttggaccttatgaagacactgcagatttattagttacaactgcaatgacaaaaaaagaatataaattcccagttatcaacgcacgtaatttcttaactggtattggtattgaagaaacaaaacaacaaatcttaacagagttacaaaaataacggaattgatatgtaacgtgggtcgataacatattaatatatgcaaattgcatataaatgactatcacgacaaatgattgttgatgacatagaaacgcagtgactgtaattcaaaatgactgcagtcgaatgtagcaagggttgtcgttgaaatgactgtaacgtcaaatgtaatcacaatcggaaagtatcgtgacaatgcatatataacagggagggtttaaatatgagttacttcactgattttgtaaggggatttttagatttaggtgcaactgttattttaccggttgtcatattcttgcttggcctattctttaggcagaaaattggagcggcatttaggtctggtttaacaataggtgtggcttttgtagggattttcttagtcatcgatttattagttaaaaatttagggccagcagcacaagcgatggttaaaaatttaggcgtcagtctgaatgtgattgatgtaggttggccagcaacatcatctatcgcttgggcatcatctgtcgcagcatttattattccactcggaatcatagttaacgttgtattactagtaactaaagtgacaaagacgatgaatgtagatatttggaatttttggcattatacgtttacagcagcaatggtttatgccgtatcaggcagtatttggcaagcgttattagcagcagttattttccaagttatctgtttgaaagtagcagattggacagcaccgatgatgagtgagttctttgatttaccaggtgtatcgattgctacaggaagtacaatttcttatgcaccaggtatttacttagttaaattgttacaaaaagtacccggtctgaataagttagatgctgatcctgaaacaattcaaaaacgttttggcgcatttggagagtctatctttgtcggattaattttaggtttaggtattggtgtgttagcaggttacaaacctggagacatcattaatttaggaatgtcaatggctgcagtaatggtattaatgcctagaatggtaaaaatcttaatggaaggtttaatgccagtttcagagtctgcaagaacatggctaaataaacgttttggcgaacgtgaaatttatattggattggatgcggctgtagcattaggtcatccagcggttatttcgacagcattaattttagtacctatcactgttttattagccgttattttaccaggaaaccaagtactaccttttgatgacttagcaactataccatttgttgtcgcgtttattgttggtgcagcaagaggaaacattattcattctgtcattgtgggtacgattatgattgcaatttcattatatattgcaacagacgtagcacccattttcacagatatggcgaaaggtacgaatgtacaaatgccaaaaggttcatctgaaatttcaagtattgatcaaggtggtaatatcgttaactatcttatctttaaactatttagtctattcaattaaaaatcgaggtgtttgtggtgaaagctttagtaaaaacaagagaaggacatggcaacttagaacttcttgataaagaagttgcaacaccgctagatgataaagtaaagattaaagtacattatgcaggaatttgtggcacagacattcatacttatgaaggtcattataaagttaattttccagtgacattaggtcatgaattttctggtgaaatcgttgaagttggagcagacgttaaagattttaaagttggcgaccgtgtcacttctgaaacgacattctatgtttgtaatgagtgtgaatactgtaaatcaaaagactataatttatgcaaccatcgaaaaggtattggaacacaagttgatggcgcatttactaattatgtcattgcacgtgaagaaagtttgcatcatattccagacgaagtatcgtatcagtctgcagctatgacagaaccattagcatgtgcacatcatggcgtttctaagattcaagtcaattcaggcgatgtagcagttgtaatgggacctgggccaatcggattacttgtagcacaagtgttgaaaagtaaaggcgcaactgttgtggtaactggattggacaatgacaaagtcagattagataaagcagaagcattgcacatggattatgtagtcaatttacaacaaacagacttaaaaacgtatatcaatggaattacagacggttacggtgcagatgttgttgttgaatgttcaggtgcagttccagcagcacgacaaggtttagatattttacgcaaaaaaggtttctacagtcaaataggtatttttaaggatgctgaaattccatttgatatggaaaaagtgattcaaaaagaaataacagttgttggtagtagaagtcaaaagccagcagattgggaaccttcattgcaacttatggcggatggtttagtaaatgctgaagctttggtgacaaaaatatatgatatttcgaaatgggacgaggcgtatcaacatttaaaatctggcgaaggtattaaagcattacttaagccgctcgatttagatgaaaatgaaggagagaattaatatggtagaatcaatgctaacttttatgcttgggccattaagacaaatcactgatttttatatggaacatttactcgtaagtaattccattgtcattgcaggttattttgcaacaggtatttttaaaaagaaaaaagttgtgaattaaatcaaatttgaggtgatttacaagtgaaagcattgaaattatatggcgtggaagatttacggtatgaggataatgaaaagccagtcatagaaagtgcgaatgacgttattattaaagtacgagcgactggcatatgtggttcagacacgtcacgatacaaaaaaatggggccatacattaaaggtatgccatttggtcatgaattttcaggtgtagtagatgccattggaagtgatgttacgcatgttaatgtgggcgacaaagtgacaggttgcccagcaatagcttgttatcaatgcgggtattgtttaaaaggtgaatatgcacgatgtgaaaagttattcgtcattggctcatatgaacctggatcgttcgcggaatatgtcaaattgccagcgcaaaatgttttaaaggttccagacaatgttgattacattgaagcagcaatggttgagccatcagccgttgttgcgcatgggttttataaatcgaatatacaacctggtatgactgttgcagtaatggggtgtggcagtataggtttgttagctattcaatgggcacgaatatttggtgctgcacatatcatcgctatagatatagatgcgcataaactagatattgcaacatcattgggcgcacatcaaacaatcaattcaaaagaagaaaatcttgagaaattcatcgaaaatcattacgccaatcaaatcgatttagctatagaatcatcaggtgctaaagttacgattggtcaaatattgacgctacctaaaaaaggtggcgaggtggtattactcggaataccatatgatgatattgagattgatcgcgttcattttgaaaaaattctgcgtaatgagttgacagtatgtggctcttggaactgtttgtccagtaattttccgggcaaagagtggacggcaaccttacattatatgaagacgaaagatattaatgtaaagcctattatttctcattttttaccgttagaaaaaggcccggagacatttgataaattagttaacaagaaagaacgatttgataaagtcatgtttacgatttattagtatgcacctttgaggacgaaaacgctggtatagttatagctatgaaagtgcgaatgccgtctggtctacagatactatcgaaataattcatcttcgaatatacgttgataaatagccggtttacttgtgtgaaatatgcttgtgaatcggttgttttgcattttgtatacttaaaatgagatggcaatatttgataatttttaaagtgaaaatcaagtacagccacttaataagataaatttattataatatatggtaaaatgatggcagtaataatgaatttgaaaaagagtaaacattaatacctttaacaatttaatatcgtcagagttaatgattaactgcatggcaaaacaacttagaatggtcagttacaaaaatacatttttataaaaaattatcacactattgtgacaactatctttggattaataaaagaggcaagtgagcaataggttaggcttatgtgcgggcataggtcagtaatgtataaatggaaatgatgtaatgacagaatggaggacaacatgatttatgcaggtattttagcaggaggtattggttcgagaatggggaacgtgccattaccaaaacaatttttagatattgataataaaccgattttaatccatacaattgagaagttcattttagtgagtgaatttaatgagattattatcgcaacgccagcacagtggatttcccatacacaggatattttaaaaaaatataacattacagatcaacgtgtcaaagtagttgcaggtggtacggatcgaaatgaaacaattatgaacattatcgaccatattcgcaatgtaaatggaattaataatgatgatgtgattgtaactcatgatgccgtaagaccatttttaactcaacgtattattaaagagaacattgaagtagcagcaaaatatggtgcagtagatacagtcattgaagcaattgatacgattgtaatgtctaaagataaacagaacatacacagtatccctgtaaggaatgaaatgtatcaaggccaaacaccacaatcatttaatattaaattattacaagatagttatcgcgccttaagtagtgaacaaaaagaaatcttatcagatgcatgtaaaatcattgtcgaatctggacatgcagttaaattggtacgtggagaactatacaacattaaagtgacaacaccgtatgatttaaaagtagcaaatgccattattcaaggtgatattgccgatgattaatcaagtatatcaactcgttgcaccgagacagttcgacgtcacatataataatgttgatatttatggtaatcatgtcatcgtaagacctttatacttgtctatttgtgcagctgatcaaaggtattacacaggtcgaagagatgaaaatgtactacgcaaaaaattaccaatgtcattagttcatgaagctgttggtgaagttgtatttgatagtaaaggggtatttgaaaaaggtacgaaagtagtaatggtaccgaatacacctacagagcaacatcatattattgcggagaattacttagcctctagttattttagatctagtggttatgatggttttatgcaagactacgttgtgatggcacatgatcgtatcgttccgctgcctaatgacattgatttgagtacgatttcatacacagagttagtgtcagtaagttatcatgctatacaacgatttgaacgtaaatctatacctttgaaaaccagctttggtatttggggtgatggtaacttaggttatattactgctattttgctacgtaagttgtacccagaagctaaaacttatgtatttggtaagacagactataaattaagtcatttttcatttgtagatgacatctttacagtaaatcaaataccagatgatcttaaaattgatcatgcatttgaatgtgttggaggtaaaggaagtcaagttgcacttcaacaaatagttgaacatatttcaccagaaggcagtattgctttgttaggcgtaagtgaattacccgtggaagtgaatacacgattagtacttgaaaaaggattaacgttgattggtagtagtcgaagcggctctaaagattttgagcaagttgttgatttatatcgtaagtacccagacattgttgaaaagttagccttattaaaaggacatgaaattaatgtatgtacgatgcaagatatcgtccaagcgtttgaaaaggatttatcgacatcttggggaaaaacagtattgaaatggacgatttaataaaccgatgggggaataacaatgacaaaaacgaaacaagcaatacatattgataacatatactgggaacgtgttcagttatatattgaaggacatagtgaaggtgtcgatttaacatcaggacaatttgttctgaggaatttaaccgaaacaaaaacattagaagcaaatgaaatgaaaatagacggtaatacatttatatgtagattcaacgtcgcaatattagacgatggatactatttaccaatggataaatatttatttgtttatcatgaccagttagagtatattggacaacttaatccaaatattattgatcaagcttatgcggcattaaatgaagagcaaattgaagaatacaatgagctgactacacaaaatggaaaagtgaactatttattagcgtatgatgctaaagttttccgcaaaggtggcgtatcacaacatacggtctataccattactccggaaatagcaagtgacgttaacgaatttgtatttgatattgaaatcaccttacctcaagagaaatcaggggtcattgcgacaagcgcacactggcttcataaacaaggacataaagcttcatttgaaagtagaagtttcttatttaaagctatttttaatattacaaagttactacatattaaaagaagcaaaacaatattattcacatcagattcgcgtccgaatttatcagggaatttcaagtatgtatatgatgagttacttcgccaaaaagtagattttgattatgatattaaaacggtatttaaggcgaatattacggatagacgtaaatggagagacaagtttagattgccatatttacttggtaaggctgattatatttttgtcgatgatttccatccattaatttatacggttcgctttagaccatcacaagaaattattcaagtgtggcatgccgttggtgcctttaaaacagttggctttagtcgtacaggtaaaaaaggtggtccgtttatcgattcattaaatcatcgtagttacacgaaagcatatgtatcatcagaaaccgatattccattttatgctgaagcatttggaattagagaagaaaatgttgtaccaacaggtgtaccacgtactgatgtactatttgatgaaacttatgcaacacaaattaaacaagagatggaagatgaattgccaattataaaaggtaagaaagttattctattcgcaccgacatttagaggtaatggtcacggtacggcacattatccattttttaaaattgatttcgaacgtttagcaagatactgtgaaaaaaataatgcggttgtattatttaaaatgcatccatttgtaaaaaatagactcaatatttcacgtgaacatagacaatactttatcgatgtatcagattatcgtgaagtcaatgatattctctttgttacagacttattgattagtgattattcatcattaatatatgaatacgcagtatttaaaaagccaatgattttctatgcatttgacttagaagattatattacgacacgtgatttttatgagccatatgaatcatttgttccaggtaagattgtgcaatcatttgacgcattaatggatgctttggacaatgaagattatgaggttgaaaaagttgtgccatttttagataaacattttaaatatcaagatggtcgctcaagtgaacgtttagtcaaagatttgtttagacgctaatattggcatatattacttgccatgcaaatgagtcataaggcatagttttcaagaagggttctgacaatgaagtgaacaacatgtcatgatgagaagcaggactatacaatgagaataaccttttgatttttcatgcataagaggctgggacataaatccctaaaaaacagcagtaagatattttctaattgaaaattatcttactgctgttctctatttatacaatacttcgtattgaatggcttcgctttgcccgtctggcacattactgtaaaattctataaatagaatttttgatgacgggtcccttcctagggtgccgtctcagccaccccaaccggcacattgttgtaagctgactatatgtcagcttctgtgttggggcccctgtcttcgactggcactgctccctcaggagtctcgccattaatactacgtattaacatgtaattttacttttaaatactttgaaaaaataagacactttgcccaacttgcacataaatgtaaaattcaataaaatgaattttctgtgttagggcccacaccccaacttgcattgcctgtagaatttcttttcgaaattctctttgttggggcccacaccccaacttgcattgtctgtagaaattggaaatccaatttctctttgttggggcccctgactagaattgaaaaaagcttgttacaagcgcattttcgtttagtcaactactgccaatataatttcgtagagcatagaacattgatttttcatgcatatggcgattcaatcaaaagcaatcaccttccaactgaattgtcattttgtaaaataaaataatcaatccaatcgttatctaattcataaatgtgtaaacacatacgttatgaatggataacgattttttgttatgttaaagtggtacattaatcatgtatttcgtatgataattaacgacaagtgtaatggttaaatgtattttatgatgaaatgctataataggcatggttacaatgagcttgctcatacatattaatataattacaaaaacacgtcggaggtacgacatgattaaaactacaattaaaaaattgatagaacacagtatatatacgacttttaaattactatcaaaattgccaaacaagaatctaatttattttgaaagctttcatggtaaacaatacagcgacaatcccaaagcattatatgaatacttaactgaacatagcgatgcccaattaatatggggtgtgaaaaaaggatatgaacacatattccaacagcacaatgtaccatatgttacaaagttttcaatgaaatggtttttagcgatgccaagagcgaaagcgtggatgattaacacacgtacaccagattggttatataaatcaccgcgaacgacgtacttacaaacatggcatggcacgccattgaaaaagattggtttggatattagtaacgttaaaatgctaggaacaaatactcaaaattaccaagatggttttaaaaaagaaagccaacgttgggattatctagtgtcacctaatccatattcgacatcgatatttcaacatgcatttcatgttagtcgagataagattttggaaacaggttatccaagaaatgataaattatcacataaacgcaatgatactgaatatattaatggtattaagacaagattaaatattccattagataaaaaagtgattatgtacgcgccaacttggcgtgacgatgaagcgattcgagaaggttcatatcaatttaatgttaactttgatatagaagctttgcgtcaagcgctggatgatgattatgttattttattacgcatgcattatttagttgtgacacgtattgatgaacatgatgattttgtgaaagacgtttcagattatgaagatatttcggatttatacttaatcagcgatgcgttagttaccgactactcatctgtcatgttcgacttcggtgtattaaagcgtccgcaaattttctatgcgtatgacttagataaatatggcgatgagcttagaggtttttacatggattataaaaaagagttgccaggtccaattgttgaaaatcaaacagcactcattgatgcattaaaacaaatcgatgaaactacaaatgagtatattgaagcacgaacggtattttatcaaaaattctgttcattagaagatggacacgcgtcacaacgaatttgccaaacgatttttaagtgataacttaaaaacaataaaaaattataaattaattagttaagtgatataaacaataaacgaaatgtttgcttgtatgttattatttgtgtatgaaaacgtctgatataatgtaatataggtttaaacaaaatatgctaaaatataagcaaaatatgtataattttaagtaatacacagacatttagagttttgattttaaaatgagttttcaattggaaaatgcaacgaaatttaaataattaaatatagatatagttgaatggaggaagtattttatgaaatacgctggtattctagctggaggtataggctcaagaatgggtaacgtacctttacctaaacaatttttagatttagacaacaaaccgattttaatccatacattagaaaaatttattttaattaatgattttgaaaaaattattatcgcgacgccacaacaatggatgacgcatacgaaagatacacttagaaaattcaaaatttctgatgaaagaattgaagtcattcaaggtggtagcgatcgtaacgatacaattatgaatatcgttaaacatattgaatcaacaaatggtattaacgatgacgatgtgattgtgacacatgatgcagttagaccatttttaacgcatcgtattattaaagaaaatattcaagctgctttagagtacggtgcagtagatacagtgattgatgctatagatacgattgttacatctaaagataatcaaacgattgatgcaattccagtgcgtaatgaaatgtaccaaggtcaaacacctcaatcgtttaatattaatttattaaaagaaagctatgcacagttgagtgatgagcaaaagagtattttatctgatgcttgtaagattattgtagaaacaaacaaaccggttcgacttgtaaaaggtgagttatataacattaaagtaacaacaccttacgatttaaaagtagcgaatgctattattcgaggtggtattgccgatgattaatcaagtatatcaattagttgcacctagacaatttgaagttacgtataacaacgtagatatttacagtgactatgtcattgtacgtcctttatatatgtcaatttgtgctgccgatcaaagatattatactggtagccgtgatgagaatgtcttatctcagaaattgccaatgtctttaattcatgaaggtgttggtgaggtcgtatttgacagtaaaggtgtgtttaataaaggtacaaaagtggttatggtaccgaatacgccgacagaaacagacgatgtcattgctgaaaactatttaaaatcgagctacttcagatcaagtggacatgatgggtttatgcaagattttgtgttgctaaatcatgatagagctgtaccactacctgatgatattgatttaagtattatttcatatacagagcttgtaacagtaagtttgcatgctattcgtcgttttgaaaagaaatctatttcaaataaaaatacatttggtatttggggtgatggtaacttaggttacattacagccattttattacgtaaattatatccagagtctaaaatatatgtctttggtaaaacagattataaattgagtcacttctcatttgttgatgatgtcttctttattaataaaatacctgaaggcttaacatttgatcatgcatttgagtgtgtgggtggtcgcggtagtcaatcagccataaatcaaatgatcgattacatttcaccagaaggaagcattgcactgttaggtgtaagtgagttcccagtagaagttaatacacgtctagtattggaaaaaggactaacgttgattggtagtagtcgaagtggttcaaaagatttccaagatgttgtagacttatacattcaatacccagatattgtagataaattagcgttgttaaaaggtcaagaatttgaaattgcaacaattaatgatcttacagaagcttttgaagcagacctgtctacatcttggggtaaaacagtattaaaatggattatgtaaatagaaaaggatgaattaacgttggttaaaagtaagatatatatagataaaatctattgggaacgtgttcagttattcgttgaaggacatagtgaaaacctagatttagaagatagtaattttgtattaagaaatttaactgagacacgtacaatgaaggcgaatgatgtcaaaatagatgggaatcaattcgtttgtcgtttcaatgtagctatcttagataatggttattacttacctgaagataagtacttattagtgaatgagcaagaacttgattatattgcacagttaaacccagatgtgattaatgatgcatatcaaaatctaaagccagaacaagaagaagaatacaacgaattagaaacacaaaatggtaaaatcaatttcttattgcagacttacctaaaagaatttagaaaaggcggcatttcgaagaaaacggtttatactgttacacctgaaatttctagcgatgttaatgaatttgtccttgatgttgttgtaacgactccggaagttaaaagtatttatatcgttcgtaaatataaagaattacgtaagtatttccgcaaacaatcatttaatacaagacaatttatttttaaagcgatatttaatacgacgaaatttttccacttgaaaaaagggaatacggtgttgttcacatcagactctagaccaacgatgtctggaaactttgaatacatctataacgaaatgttacgtcaaaatttagataaaaagtatgatattcacactgtttttaaagcgaatattacagatagacgtggcatcatcgacaagtttagattgccatatttacttgggaaggcagactacatctttgttgatgactttcacccattgatttatacagtgcgttttagacgttctcaagaagttattcaagtatggcatgccgttggtgcctttaaaacagttggctttagtcgtactggtaaaaagggtggaccatttattgattcattaaatcatcgtagctatacaaaagcttatgtatcatctgaaaccgatattccattctacgctgaagcatttggtattaaagagaaaaatgtagtgcctacaggtgttccacgtactgatgtactatttgatgaagcttatgcgacacagatcaaacaagagatggaagatgaattaccaattattaaaggtaagaaagtcattcttttcgcaccaacatttagaggtagtggtcatggtacagcacattacccatttttcaaaattgattttgaacgtttagcaagatattgcgaaaaaaataacgcggttgtattatttaaaatgcatccatttgtgaaaaatagacttaatattgcagacaaacataaacaatattttgttgacgtttctgactttagagaagttaatgatatactgttcataacagatttattaattagtgactattcatctttaatatatgaatatgcagtatttaaaaagccaatgattttctatgcatttgatttagaagattatattacgacgcgtgatttttatgaaccatatgaatcatttgttccaggtaaaattgtgcaatcatttgacgcattaatggacgccttggacaatgaagattatgaaggagaaaaagtcattccattcttagataaacattttaaatatcaagatggccgatcaagtgagcgtttagtcagaaatttatttggtagctaagtttatatagtagtcaaagtgggagaggtataatgatgaaattttcagtaatagttccaacatacaattcagaaaagtatataacagaattacttaatagccttgcgaaacaagattttccgaaaactgaatttgaagtggttgtagttgatgactgttcaacagatcaaacgttacaaatagttgaaaagtatcgcaataaattgaacttgaaagtaagtcaactcgaaacaaattctggtggtccaggtaaacctagaaatgtggcgttaaaacaagcagaaggtgaatttgtattatttgtggactccgatgactatataaacaaagagactttaaaagatgcagcagcatttattgatgaacatcactccgatgtcttattgattaaaatgaaaggtgttaatggtcgtggtgtaccacaatctatgtttaaagaaacagcacctgaagttactttgttaaattcaagaattatctatactttaagcccgactaaaatctatagaacaacattactaaaagataatgacatttattttccagaagaattaaagagtgcagaagatcaattatttacaatgaaagcatatttgaatgcaaatcgaatcagtgtgttaagtgataaagcgtattattatgctacaaagcgtgaaggtgaacatatgagtagtgcgtatgtttcacctgaagacttttacgaagtcatgagattgattgctgtagaaatattaaatgcagatttagaagaagctcataaagatcaaatcttagcagaatttttaaatcgtcattttagtttttctcgtacgaatggcttctcacttaaagttaaactagaagatcaaccgcaatggattaatgctctaggagactttatacaagcagttccagaacgtgtagatgcattggtgatgagtaaattacgaccattgttgcactacgcgagagcgaaagatatagacaactatagaactgtagaagaaagttaccgtcaaggtcaatactaccgttttgatattgtagatggtaaattaaacattcaattcaatgaaggcgaaccatactttgaaggcattgatatcgctaagccaaaagtgaaaatgacagcatttaaatttgataatcataaaattgttacagagctaacgttaaatgaatttatgattggcgaaggacattatgatgtcagacttaaattacattcacgaaacaagaagcacacaatgtatgtacctttaagtgtcaatgcgaataaacaatatcgttttaacattatgttagaagatattaaagcgtatttacctaaagaaaaaatttgggatgttttcttagaagtccaaataggtacggaagtatttgaagtgcgtgttggtaatcaacgtaataaatatgcatatactgcagaaacaagtgcattaattcatttgaataatgatttttatagattaacaccgtatttcacaaaagactttaataacatttcgttatactttacagctattacattaacggattcaatctcattgaagttaaaaggtaaaaacaaaatcattttaactggtctggatcgtggttatgtatttgaagaaggtatggctagtgtcgtgctaaaagacgacatgattatgggaatgttaagccaaacgtcagaaaacgaagtggaaatcttacttagtaaagatattaagaagcgagacttcaaaaatattgttaagttaaacactgcacatatgacttactcgctaaaataaataataaatgccctcaaatctatgtgaactaacatgatttgagggttttattttactatttatgaaatgattatgacatttccctgattttcattttcatatacattaaattgtatacactgaaaatgaggaggtcgtctataatgataaataaaaatgacatagtagcagatgtagtaacagattatccgaaagcagcagatatttttagaagcgtaggtatagacttttgttgcggtggacaagtaagtatagaagcagcatccttagaaaagaaaaatgtagatttgaacgaattattacagcgtctcaatgacgttgaacaaacgaatacaccaggttcgcttaaccctaaatttttaaatgtttcgtcacttattcaatatattcaagcagcatatcatgaacctcttagagaagaatttaaaaatttaacaccttatgtgacgaaattatcgaaagtacatggacctaaccatccatatttagtcgagttaaaagaaacatatgatacatttaaaaatggcatgttagagcatatgcaaaaagaagatgatgttgattttccaaaactaattaaatatgaacaaggtgaagtagtagacgatattaatacagtgattgatgatttagtatctgatcacattgcaacgggacaattgttagtgaaaatgagcgatttaacatctagctatgaaccaccgatagaggcatgtggtacgtggcgactcgtttatcagagattaaaagcacttgaagtgttaacacatgagcatgttcatttagagaatcatgttttatttaaaaaagtatcataaataacgcgattagaaactgttggcaaagtaatgtcagcagtttttcgctatacttaacagaaatttagtgatatgaacagcattatttgaaaagaaaaatggtcaacttagcataaaaattgatatgaaaaattaatggtatagataattaaatagtagcgtgttttttaataatttattcatgaattttacatgcactattatgataaaataaacataattataattcactgaggtgctatcgtgctatcgctaacaatgttattacttgagcgtgtaggtttaattattattttggcctatgtgttgatgaatattccatattttaaaaacttaatgaatcgtcgacgtacatggaaagcacgttggcaattatgtattattttcagtttgtttgccttaatgtctaatttaactggtatcgtcatcgatcatcaacatagtttgtcaggaagtgtgtacttccgtttagatgatgatgtatctttagctaacacacgtgtattaacgataggtgtcgcaggattagttggtggcccttttgtaggtctatttgttggcgttatttcaggtattttcagagtgtatatgggtggggcggatgcacaagtttatcttatctcatctatatttatcggtataattgctggttattttggcttacaagctcaaagacgcaagcgttacccgagtattgcgaaaagtgccatgattggaattgttatggaaatgattcaaatgttgagcattttaacattttcccacgacaaagcatatgcggttgacctcatatcattaattgcactaccaatgattattgttaatagcgtcggtacggcgatttttatgtctattatcatttcaacattaaagcaagaggagcaaatgaaggctgttcaaacacatgatgtactgcaattgatgaaccagacattgccgtattttaaagaaggattgaatagagaatcggcacagcaaattgcgatgattattaaaaatttaatgaaagtatctgccgtagcaattacaagcaaaaatgaaatcttatcgcatgtaggtgcaggtagtgatcatcacataccaacaaatgaaatattaacaagtctgtctaaagatgtattgaaatcaggaaagttgaaagaagttcatactaaagaagagattggttgtagtcatccgaattgcccgcttagagcagctatcgtgataccacttgagatgcatggttctatcgtcggtacattgaagatgtattttacaaaccctaatgatttaacttttgtggaacgtcaacttgcagaaggattggcaaatatttttagtagccaaattgaacttggtgaagccgaaacgcaaagtaagttattgaaagatgctgagattaagtcattacaggcacaagtgagtccacattttttcttcaattcaattaacacgatttcagctttagttagaataaatagcgaaaaggcacgagagttactattagaattgagttattttttcagagcgaatttacaaggctctaagcaacatacgattactttagataaagagttaagtcaagtgcgtgcatacttatcactcgaacaagcacgttatccaggaagatttaatatcaatattaatgttgaagacaaatatcgcgatgtgcttgtaccaccatttttaattcaaattttagttgaaaatgccatcaaacatgcgtttacgaatcgaaagcaaggtaacgatattgacgtgtcagtgattaaagaaactgcaacacatgtacgtattattgtacaagataatggtcagggtatttctaaagataaaatgcatttgttgggagaaacatctgtagaatcagaatctggaactggtagtgctttagaaaatttaaacttacgcctaaaaggattatttggaaaatccgcagcattacaatttgaatcgacatcgagcggtaccactttttggtgtgtacttccttatgaaagacaagaggaggaataaatatgaaagcattaatcatagatgatgagccattagcacgtaatgaattaacatatttattaaatgaaattggtggttttgaagaaattaatgaggcagaaaatgtaaaagaaacattggaagcactactgatcaatcaatatgacattatatttttagatgtcaatttaatggatgaaaatgggatcgaattaggagctaagattcaaaagatgaaagagccacctgcgattatttttgcaactgcacatgaccaatacgcagtacaggcatttgaattaaatgcgacagactatattttgaaaccgtttggtcaaaaacgtattgaacaagcagtcaataaagtgcgtgcgactaaagccaaagatgataatagcgcaagtgcaattgcgaatgatatgtcggcgaattttgatcaaagtttacctgttgaaatagacgataaaattcacatgttaaagcaacaaaatattattgggattggcacacataatggtattacaaccatacatacaacgaatcataaatacgaaacaacagagccattgaatcgttatgaaaaacgattgaatcccgcttatttcatacgtattcatcgttcatatattattaatacgaaacacattaaagaagtgcaacaatggtttaactacacttatatggtaatattgacaaatggtgtcaagatgcaagttggacgttcatttatgaaagattttaaagcgtcgatagggttactttaacagtaatccttttttttatgcattttacctatgatattttgtatttcggactaaaatttacgcaaatcgaagtgagccatctatactttagttaaatcaaacgtaggaggcaatggtcgtgaaacaacaaaaagacgcatcaaaaccagcacacttttttcaccaagtcattgtaattgctttagtactctttgtatcgaaaataattgaatcatttatgccaattcctatgcctgcatcagtaatcggtttagtattattatttgtattattatgtactggtgctgttaagttaggcgaagtcgaaaaagtaggaacgacactaacgaataacattggcttactcttcgtaccagccggtatctcagttgttaactctttaggtgtcattagccaagcaccatttttaatcattggactaataatcgtctcaacaatactattacttatttgtactggctatgtcacacaaattattatgaaagttacttcgagatctaaaggtgacaaagtcacaaaaaagatcaaaatagaggaggcacaagctcatgattaaccacttagcactaaacacaccttacttcggaatactgttatccgttataccatttttcttagcgaccatattatttgaaaaaactaatcgtttcttcttattcgcaccgctatttgtcagtatggtatttggtgtggccttcctctatttaacaggcattccgtataagacttacaaaataggtggagacattatttacttcttcttagaaccggcaacaatctgttttgcgattccgttatataaaaagcgtgaagtgcttgttaaacattggcatcgtatcatcggaggtattggtatcggtacagttgtagcgttattaattattttaacttttgcgaagttagcacaatttgccaatgacgttattttatcaatgttacctcaagcagcaactacagcgattgcgttaccagtatcagctggtatcggtggtataaaagaattaacatcattagcagttattttaaatggtgtcattatttatgccctaggtaataaattcttaaagcttttccgaattactaaccctattgcccgaggattagcacttggaacaagtggtcacacattaggtgtagcaccagccaaagaattaggacctgtagaagaatcaatggcaagtatagctttagtgttagttggtgtagttgttgtagcagttgtgcctgtctttgtagcaatattcttctaaaacgaaaaacctaagcaagataatagcaatttgagccattgttattatcgtaaaaaaacgtctatactccagtttataactgggatatagacgtttttatgtatttattactttttactaggaatataaaactgtgcatgacgataatgaaatacgatgtcagatgaatcaaagggtttgccagtcattgtataaaaagtctggtggtaacgtaaacatggttcacctgtagacaattgtagtaatgaagcttcacttgaagtgagttgatctacattaaagaaaatatttgaaaaaccaatacgaagtttcatgtttgattctaaatagtcgaagatagagcccttagcaatatcatcatttaaatatttcacgatttctttatgataataagaatattcgatacataaaacatcatcgtccacgaatcttaatcgctctaaatagtagacggtatcatctgcatttaattggagctcatcttgtacagatttaggtggcgttgcaatctccttaaaaacaagtaccttacttgtcattcggtgttcacctaaacttttagagaaaccattagtcttaaagacgttgatacgattggcatcagcaatatttctcacataaataccactgccttgtgcttgatagatcaaaccatcttgttccaataagcctaatgctttaatgatagtactcttacttacttgataacgttcttttaattgcgtcacgcttggcaatttatcaccgggtttgaaattagattgatgtataaacgcattaagttgcttagcaatatgttcatactttaacaatattctgtcctcgtttcactttgtctgtaattattatagcacaaaatattataattgtatcggcgtttacaaattgaaccggtacaattataattggaggtaagtaaatacattttcattctactatcaagttgagggggtaatatttatgagcaataaatataaagaacaagcccaagacattcttacagctgtaggtggtgtcgaaaacattgttgatgcaacgtatgatacgaagtgcattacaattcatatgcaacatacaattccttctacagcaaatgaagtgaaacaaatagttgatgtgacatctgtagcagaaaatgatacgcagttagtcataaaattaaatggaaatgtcgatgaagtgtatcagcaattacagcgattaattaagaatgctaatgtcgaagagagtgagaatactgacaatattaatagtcaagatacaagttatacacctcaagtaaaagtaacaacaccaattttagtgaaagcaccaatcgctggtcgtcgtattttacttaaagaagtaagagattcaatttttagagagaaaatggtaggtgaaggcttagcaatcaaagctcatgaagaatccaaagtaatcgcaccgttcaatggtttaatatctatgattgtaccaactaagcatgcagttggtattcaatcagaagacggtgtggacatagtcattcatattggcgtgaatacagttgacttggaaggtaaagggttcaagtgctttgtaaagcaaaatgatcatgttgaagcagggcaaacgttgttgcaattcgaccagcaatatatacaacaacaaggctacaatgctgacgttattgtcgttattagcaactctgccgatttaggaaaagtagaactgacaatgaatgaaatcattacgactgaagatgttatttttaaaatatttaaaaactaggagtgtgttgtaataatgacaaaattaccgcaaaattttatgtggggtggcgctcttgccgcaaatcaatttgaaggtggatatgaaaaaggtggtaaagggttaagtgtaattgatgttatgacgagtggtgcacatggcaaagcacgtcagattacagaatctatagacctcaatcactattatccaaatcatgaaggtattgatttttatcatcgttataaggaagatattgccttgtttaaagaaatgggattgaaatgtttacgtacgtcgattgcgtggacacgtatctttccgaatggggatgaagatgtgccaaatgaagaaggacttgccttttatgatcgtatctttgatgaattaattgcacaaggtattgaacctgttgtgacgttatcacattttgagatgccacttcatttagcgaaacattatggtggatttagaaatagagaagttgtcgattattttgtgcattttgcgcgtgttgtatttgaaagatataaagataaagtgacatattggatgacgtttaatgaaattaataatcagatggacacatcaaatcctatctttttatggacgaattctggggtagcattgacagaaaatgataatcctgaagaagtcttgtatcaagtagcacatcatgaacttttagccagtgctttagcagttcgtcttggtaaagagattaatccgaagtttaagattgggacaatgatttcacatgtacccatttatccatattcgtgtcatccgaaagatatgatggaagcacaaattgcgaatcgcttacgtttctttttcccggatgttcaagtaagaggttattatccaagctatgctaaaaaaatgctagcacgaaaaggatatgatgttggatggcaagaaggggacgacagtattttacagcagggcacggttgattatattggctttagttattacatgtctacggctgtaaaacatgatgttgatactacagttaaaaacaacatcgtcaacggtggtttgaatcattctgtggagaatccgcatatcgcaacgagtgattggggttgggcgattgatccagatggcttaagatatacattgaatgtgttatatgatcgttatcagttgccactttttattgtggaaaatggttttggtgcagttgatgaagtggtagatggacatattcatgatgattatcgcattgaatatttaaaagcacatattacagcagcgatagaagcagttgatcaagatggtgtagatttaatcggttatacaccgtggggaatcattgatattgtttcatttacaaccggtgaaatgaagaaacgctatggtttaatatatgttgatcgagataatgatggtcatggcacgatggaacgcttgaaaaaagattcgttctattggtatcaacaagtgatagcatcaaatggagataaattataaaggtatattataagtattttagggttagagcccgagacataaattaatatagtaggacctacagtgttatattggcgggccccaacatagaagctggcggaaagtcagcttacaataatgtgcaagttggggaaggacaggaataaattttgcgaaaatatcatttctgttccaatcccgtgatgttaaaatttttaaaaaaataatgccactaactaagtatgtacagtgttaatgtttgagtgtttatgaaagtctttaaccaaaattgatgacttactaatcaacgataacgatattgttaagtagatgattagtgtcacaaagaaattaaagtagcagtcaaacatagatacaaagtacggttagtggcattatatttagtcctcttttttagcgacaaaagtaatataattcatatctttacgcaatttagtcatcgttttaaacattttacaaaacattggtcgattttctttttttaaagcattgttgataatctttatagttccaacaataccttcgtcataaattaaaccttttggtgtcattaaactcattggaccagtatgataatgcacatgattaaaaccagcttgattatataaatctaaccagccaagtttcgtctgcggtgagacattgacattaattgctgcagataatgatttaactacatgtgtggcatgtgattcattaacgatgacaatatcatgtgttaacaagatacccccaggctttaagactcggtagtactcgcgtaatgctttttcctttatggtgatgggtaacattgttaacattgcttcatttaaaacgatatcgaattgattgtcatcaaagggcaatttaacagcattcgcttgttgaacttgaatatatgattcaagacctgctgctgaaatattttcctgtgctttttctaatgctttcttatttatatcaacgccttgaatgtgacagccatatgtatgagctagataaatagatgttgtgcacatattacatgccacttctaacacttgtttatcttgtgaaaatgccccttgttgtattaaccaatctgttgcttctttaccaccggggcgtagacgagtttttcctaatttagctaaaaatgtatgaccagcttctttagacatagcataacctccttttaattgataattattatcattaatatagcatatttatatgcaataatttggaagttaaaaagattacaaaaaattgtcacttcatttataactaaacatgagtcaacaagcataggtttagtggaaaattatttctaatagatgatgttttataaagataaaaaagcacagccatgatatacgaatgttgcatgttatatgctaaaccttcatatcatagctgtgtttgattcatttaaacttgatttacttcttctagtagaggaatagatgcttgcgcgccgtgtttttgtacagtgagtgagctcgctttattaccaaaatcaatagcatctgctaagttatcttgcgacttgtttaagcgactgacaaatgcaccaataaatgtgtcgcctgcagcagttgtatcaatcgcatttactttataagcttcgatgtgttggctttgatttttagtagcaaaatatgtaccttgcttacctagcgtaatcaaaacagtcttaatgcctaaagataaaaagtaattggcattgtctttcatagattgttcattagttactttaatcccagataacaattcggcttctgtttcgtttggcacaataatatcgattaatgataataattcattaggtaatgctttcgctggtgcaggatttaatactgtcgtcacaccatgtgccttggcaatttcaaatgcagatataatagccgggatgggtacttctaattgtgcaacgacaaagtctgcattgattatagcgtcttttgcgttaataacatcttcaggtgtcatcgtcatattcgcaccaccataaacatagatggtgttttgtccttctgcattcacagtgataaaggcttggcccgtttttgcttcagttgttttgataatatatgatgtatcaatatgagctgctttaaaatcttctaagatgaaatcagcaacgccatcagtgccaattttagtaataaatgttgtgtctgcttgcatgcgtgcagtggcaatagcctggttggcacctttacctccgccgaatgctttttgtgcttcttcaacatgtaatgtttcgcctggttgtgcatatctttcaactgttaaaaattgatcgacattcgttgaacctaaaataacaactttgttggtcatgtgtacgctcctttcaagttataacttttaaaaagtaacattcgattctaatgcaatattagagtagggcgttgtttcaccagtacgaatattacctttatttaatgggtgagctaagttacttttcatttcttcgtgaggaatgaaaatgatttcgatttccgatgaaatcaattgtttaatttgttgcaattgtgtagggttatgttcttttatttcttctgctaagtatattttttggatttccatttcttctaacactgtagctaagacatcaataaagcgtggtaagttttttgtgacagctaggtcgatacggcgatgatcatttggaattggcatgccagcgtcattaatcgttaataaatcaaaatgaccaattgtcgcgattgcttttgaaatatgttcatttaaaacagctgattttttcatgacatctacactccttattttataaatactgtaacagaagcggctactaaaatgagtactaagccgatgattgtaataaccatttcttttgacgttttatgttgttttaagaaataaataccagttaatgtagcaagcacaacggatgtttgagaaagaataaatccagttgctaaaccattcatattaggttgtgctgaaataagatatgttaaggcaccaaatgcaaagaagaaacctgaaataatttgtaaccacgtaattttattacggaatggattctctgctttcatattcataaagccataaatgactgcaacaattaccatacccattgcttgaggtaaaaaggcagttaggccatcaatagaagttgcttgcggtgcggctgaatataaccagtatccaaattcaccaactaacagaagtaccactgcacgacgtaaatttttgacgttacttgcttctttgcgttcactccaaactgtcatacgcgcaccaattagaataacgactaaagctgtaaatccaatgattttatgaccaatgcctggccaatttcctaatgcaaagacaccccataaagatgcgcctaataattggaatgctgttgtgactggcatggcacgagatgagccgactaattcgaacgctttaaatgtaatgatttgtccgaatccccatcctgcacctgataataaggcgaatagcaaattggttccagtagggaagccacttgatgtgactacggctaatataatagcgaagattaacgtacctgcagtagcaccgataatttgatgtacaggtttaccaccaaactttgaagcgactgttgggaagaagccccagccaattaaggggcctaacccgataagtaatgcaacaatgctcatgttatacacctcacgatttgtttttagtaaaacgttttaccattgccatcgtaccattttcatttgtaaaatgcatgcgttttcataaaaactgaaaacgtttaaatcatatttaaaaattcatacattattattttaatttcttagtgaaataattatgattaaaaaccctcagcattaaagcaacgctaagggcataacaatgatgagtatatttcggaagatacgtagttagtttgaaagatgatagccagttgttgcacgaatttttaaagtcgttggtaattcaatcatatcaatggatttatctaagtgctgtaatcgttgaagtaataaggttaaagatgttttgccaatatcagttataggttgtgccacagtagttaaaggtggcgagacgtacgctgcataatcaatgtcgtcataacctattaatgagatatctttcgggatactgatgccatgttcaattagtcctcgtaaaatgccaatagagagttcatcgttaatagcgaagattgcagtggcagattgaaccatgatgtcatcaacaatggttagcccaccgcgcttagataattcagtatggacgatttgtggttctggcaattgattcgcgcgcaaagtatcgacaaatccagcgacacgagtcgacatattcgccatcatgtcatatggtgcaacaattatcatatggttgtgaccgagttctattaaatgttgtgctgcaagttgtccgccttgatattcatttgtccgaacaaaatctgtatagccttgatggtcattttgatccagtacgacataaggtacatgatgtttctttagatagttatttagagcgtccggggatgaaatgtattgtgcgataattaatccgtcaatacctcgatcaattaaatgtttaatattgtcatacaaatcagttgctgtagatgttaaaaagcataaatcaacatcagatggtttatggtcatgaatactttgcatcagtgctgagaaaaacggatttgttaagctaggcaaaatgacgccaatagtttgaattttactgccgcgcaattgttttgcatgtttattaggggcatagcctaaacgttctgaaacagcatgtacgttttttatcgttgttgcggaaaaacgactatcatgatgatttaaaatatgtgacacagttgtaactgatacaccagcttctctagcaacatctttaattgacacttttttcatattatattccttctctttattgtgtaattaatcatacagttatatacccgattattatattcatcatatcatgataaacatttgatgacatatgaagacgtgaatgacttttattgtctacaaacagacgcctatagtatgcgattaaggttgaggcgagagaatatattattaaggttaaataacttttaatgattatgataacaagaattttaaaatgtttattgtgatgaaaaatacaaaagtcattattttaaagaataaaatatttgtttttgaaaaaagtattaaaaaacataacgaaatgatgtatattgaactatgtgattgaaaaaatttttaattaaggcttgttaaaaattaagagaggatgtttttaaatgcaattcaaattaaaagaagaagagattattagttttttagaattgaaatatccagaaaaagagttcgaatatggtcgtttgttagttggacaacataaacgtgatgatttagatgtttattactttggtgatacgtttttaatgtgcacgattatttcattcaagacatttgaaattaaagaaacagtagaattatcatatgatgctgttaatcgtattgtgttaaaagatggatggttatttagaaaaatgagaatagaaacaatgcaaaaagtgttaaaatacggtacatctaaattaatgttaactgattttcaaaaagagaattataataaatatattcaaggtcagaaacaacgcgtgatatttgaaaatggccattttgtctaattgatagtgaatataattagagtaagaggctgggacataaatccctaaaaaacagcagtaagataattttcaattagaaaatatcttactgctgttctctatttatacaatacttcgtattgaatggcttcgctttcctagggtgccgtctcagcctcggtcttcgactggcactgctccctcaggagtctcgccattaatactacgtattaacatgtaattttactttgaaatactttaaaaaaataagacactttgcccaacttacactaccaatagaaacttctgttagaattcctcaaaatgatatttcgcgacatgttaatgaaattgttgaaacgatacctgatagcaaattcgatgaattcagacatcatcgtggcgcaacatcctatcatccaaagatgatgttaaaaatcatcttatatgcatatactcaatctgtattttctggtcgtagaatagagaaattacttcatgacagtattcgaatgatgtggttagctcaagatcaaacaccttcttataaaactattaatcgttttagagtgaatcctaatactgatgcgttaattgaatctttatttattcagttcgcttatttttcttgaatttcttgtatatcattttaaagtgataaagatatttcgaaacataattcttctattatatttaagatttaactgtttttggaatgatcatgtatgcagacaatgagccaaggatcatcaatacaatgctgacgataaatgttacggttgcagctacacttggtgcatagtttagttgtaacatactgaaaactgtagtacttagtgctataccaaaggcgccacctaatgtaccactcattttatataatcctgtagctaaaccaactttttcatttggcatactgaaaattgcaattgtaaggccgggtgttgcgactaaaccatttccaattgcgcaaatgacgaaaccaatgataactgcaatgacatattgtgatgccgataattgagtcatgctaataatagtgatgccgatgacagggaacaacggaccaatgatgagcatcaatttgccaccgaaacgtaatgttgctttttcacctaaacgaatcatcgcaactgccacaatggcatatggcaatgtaacaagtccagattgcgcagctgataaaccaaggtgtgtttgagcatatatgaaaaagaccactgttacgcctaggccactatttaaaacaaagttatttaaaaatgcaccaatgaacggacggttgcgtaatactgagaaatcaataaaaggtacttcatgtcgacgttcgatgatgatgaatatcaacgtagtgatgctaaaaatgctcagacaaatgattgaaaatgtactaaaccaaccttgttcgaatccttgtgttaacaataatgtaaagctaccaatcataacagcgaaaatcgacatacctttgtaatcgaatggatgacggtggctatgttgacttactttttcaggtgtgccttttagaagcaatatggcaatgaaagcaatgactatactaatgatgaaattcgtttgccatccgaaatttgaggcaattaaaccgccgataacaccagctaggccgatgccaccaacagtactaatcattagataactaatcgctcgtcttaaatgatctcctttaaattgattatttaaaacgccaactgttgaaggtaacaagatagctgctgatagaccttgtaaaattctaccgatgatgagcagtgcagtgatgtccgatataattaatagaagagatgcaaacatactgattatgagacccatgtatgtcattctcagttgtcctattttatcagcaatatcacctgcagccaccatgaagatacctgtggcgaaggaagttaaactaatagataaatttaacacggcaggagaggtttgatacgtttgaccaacgagaggtcctatattaataaatgattgtgcaaacaaccaatatgttaatgcagacaacataatcgcaataataatattactgcgtggtgaagattgtgtgttattcacagatgtcactccttgtaaaaattaaatatagaaagtcatgagatgaagtgaacggatgtatagatgatcgttcactcacacataagtcatgatttccttacatatcataccacagttattgagaatgaatatcaattaattgcttgtataattgattttttatagtatgtttaagtgaaacagctttatttgaaagtgattaaagtaaatgaaggtacagaggagtgagaacaatgtgcacaggattcacaatacaaactttaaataatcaagtacttcttggacgcacgatggattatgattatccattagatggttcgccagcagtgacgcctagaaattatcgttggaaatctcgcactggcacgacaggccaaacgcaatatggctttattggcacaggaacagatatggaaggttttatttatggtgatggtgttaatgaacatggcgttgccatttcaacacaatatttccgaggttatagttcatatggatcaacacacaaagcggacgcgatgaatattacgcaaaatgaaattgtgacatggattttgggatatacaacaagcattgaagatatgaaacaacaagcatcccaaatacatgttgtagctgtatatttaaatgacatcggtgaagttccgccattgcattatcatgtttccgatgcaactggacatacagtcgaagtttcatttaaagagggtgaagtggttataaaagataatcctattggtgtcttaacaaatcatccagacttaaattggcattatagtaatttaagacaatatatcaatatttctccttatccagcaacagcaaatttattggaaggtgtaacgattgaacctttaggcaatgaagcaggtacatttggattgccaggtggatttacttcaactgagcgctttgtgagaatggcatttatgaaagcaaacattgctcaaaacaatgataaagaaatggatttaatgaatgcattttatttattagatgcggtaaatataccgattggaattgtacgtccgcatgatgctgacaatcactatacgatgtatcagaccgtaataaatttaactacaagaacgttatatattaagtattatggcagcaatgaattagtagcattaaagctcacagatgatttaattaatagaaaagatatgacgatttttaagcctgagaagcatatcattattagaaagttgaatgacaatcaatagcgattgataatggaatttggttgatatgatttgatggatgattactatcatacattagcgttgaagcgcgaacatggacgaatgattagttgttagttttgaaaatttataaaaggttaaacgaatgcagtgagagatgtcattttaatatcaatgtatggctattttgtaatgacaatgtaatgagtttagtaaaacatttcgggaatattaaatagttggaaaatgagaattaaatcctttactcagttgtctaattcttttagtatgtgcagtacagtttaattgaaaactaactttaactttaatggaggatgttttatacatgaaaaaattaacagcagcagcgattgcaacgatgggcttcgctacatttacaatggcgcatcaagcagatgcagcagaaacgacaaacacccaacaagcacatacacaaatgtcaacacaatcacaagacgtatcttatggtacttattatacaattgattctaatggggattatcatcacacacctgatggtaactggaatcaagcaatgtttgataataaagaatatagctatacattcgtagatgctcaaggacatacgcattatttttataactgttatccaaaaaatgcaaatgccaatggaagcggccaaacatatgtgaatccagcaacagcaggagataacaatgactacacagcgagtcaaagccaacagcatattaatcaatatggctatcaatcaaatgtaggtccagacgcgagctattattcacatagtaacaacaaccaagcgtataacagccatgatggtaatggaaaggtcaattcccctaatggcacgtctaatcaaaatggcggatcagcaagtaaagcgacagctagtggtcatgcgaaagacgcaagctggttaacaagtcgtaaacaactacaaccatatggacaatatcacggtggtggtgcgcattacggtgtcgactatgcaatgcctgaaaattcaccagtttactcattaactgatggtacagtagtacaagcaggttggagtaactatggtgggggtaatcaagtaacgattaaagaagcgaacagtaataactaccaatggtatatgcataataatcgtttaactgtttcagctggtgataaagtcaaagctggtgaccaaattgcatattcaggtagtacgggtaattcaacagcacctcacgtacacttccaacgtatgtctggtggcatcggtaatcaatatgcagtagacccaacgtcatacttgcaaagtagataatacagtaaatcccaagttacgatatcatacgcaacttgggattttttcgttttaataataggtataagcccattgcttgtcctctaagacatgttgataaaaaggatcttggccaattaacttgatatcatctgcaagtgcttcaacttcatctaaatgatgggtagttaatataattaaacatttagatttcatgatgttaagtagttggtggatgtcatgtctagattttaaatcaataccaactgtcggttcatctaaaatgagaattcgaggttgacctagtaaacctactaatatattaattttacgtttattcccaccggacaatgtagatactttggcagacgtatcatcaaaatttaattgctgtaaatattcgttgatagttgtatcgttaattggatttttacaaagtgatttaaaaaatttaatgttttcagccactgtcatgtgttcaaataacgcaatgtcttgtggcacataaccgatgtgattttgtatttgtctttgattccatttttcgtcgaaatagttgatagttccatcattagctttttcaataccagcaatcatacgaagtaatgttgattttccagcgccattatcgccaagtaatacggttaaacgattactatcaaaggacatggttaaatgattgaaaatctgtttgttacggtaacgctttgaaaggttattaatttctatcatcagttacgctcctttacatgaaaataatcaagtatacgatacccatagcaagtgcatatataaatgtcatgaataatcgatgacttattgtttgaatatggaataagataaagacgatacctatctcataaatcaatataagtaacagtgattttaagtaaaatattaagctgagtggttgagacaaatatagactaactgccaatagtaccaacaataacaagatcgtatgtgtcattacataagtactatatagtttgaaacggcttaaatgatattgtgataatcgttgcaatgctgcttgttggtttaaacgataatgaagtactacttgaacagcgctaacaaataaaatcaccgcaaagattaagctaattgaaatagagtgttgtgcttgtttagtaagcgacacaaatttgattttagattcaggtgtatgtttatgataggacttgttgatagcatcgatggattgatgctgtttcatatcctcaaggtgttcataaataatgttaggaatttgctgttcatataatgaactactaacaatttctacagcaataccacctataaagtcatctctaccatataactgtatcgtttcttttaaacggttctcttttaatttttgagagaaacctttaggaatttgcatacttaaaatagcttcctttttagcaacatcatcttcaatatagctttcatcttcatcgacttttttaatagttacatagtcagattgtttaattttattgacgaatgattttgatgcagtggtttggtctaaatcttgaatggtaatcggtattttgaagttgtcatgtgctacacggtaaccgataccaataagtacgagtgcgatgacaatggttgttacgagcaagatgtattgtaaccattgcttgaacacaacaagttgtatataaggcttcattgacgatacctccaaaccaatacagctaaattaattatcaaaagtgcgatgaagctaagatagaaactagggtgtagttctaaaatgtagttgtttaaaataatttctaacaattgatttgttacaactgcgaacggttgaatattgaaaacgccatttgctatatgttgtaaaaaaatcgtaggtattgttaaaccggataacaccaggatgacaatagctaatatgactttactaatactattcaacaagcctgttgttaaaagttcgatgagtaataaccacagtattaaaaaggtaacataatagcttaaatgaatggctaacgttggccaattatataattcaaaggtattcggaatactgaacacaatccaaactacaccaacgatactccataacatagtataaaaccatgtaatcaacgcacgaatgattaacaaacgctctttagaaaaatgaaacattttcaatcgcgctttcaatacagtatcttgattcattttcaaaactgtaaataaagatagtgcaaagatgaataccgttgctaaaaatccggtaattgcataataactgcccgtatcgtataaatgaatcggttctaagttaaatgcacctgaacggtttaatcctgtaatcagcaaatcagtcataacattgatactgtcagaatgtgatgctttcggtgctaagtcttgaaaagctaagatgccacccattgattgcataagacgttggtaaacagaatctgttagctgagatagcacgacacttttcatggattgttggtcatatgtatatactgaaattggtagttcgccttgtttataaaatgccttggtcatacctttatcaaaaacaaaatagccttgaagtttatgtttttttaacaaagtatgtgcttgcttatcatcatatgctttaatgctcacgttttttcctaggttactccctttaccaatagagtttaagattaatttcgtttcacttgattgatctttatctacgacacctatattaaaatgattgtcatcttctgttacatgttggatcgtcgttaatgtaataacgagtgccgctaatataaatagtaaatagataatcaaataccactttttcaataaaaaagagtggtagatgcgaaacaaatgtattgttttcatttaaccactcctccaatgataagattgaaaggcaagatgaccttccaatcttatttttatattttagttatttagatgccttttttaaaattgattcaaacattttgccgccatttttttcgatttctttttcaagtttttcacggtcttttgaagatagactattgaaatctttcgcaccactatcatcaaaatcaatatctgctttcaattttgtgctagattttaaaatgaaattaattggttcttcagcatatttgatgccgatatttaacgtagatttctgagtgttattttttacgtcagaatctatattattttcaaaagtgaattcattttcgtcgctatatttatctaatgcgacagtaattttacctttatcttgacgttttgtgccatctactttctcttggttatctaatttgatttttgattcatcatattctgtctttttaccaaattcgtatttatcactgtatttattgtctttttccttagaagatacgcctttaattgtatatttcgcttcagcatacgtgtatttatcttgatcgaaatcaagtgcgtaatctagttttaacttatcgtcttctaaagtattagtacctttgattttagttttattattttctttgtctgtaatagtaatttctcgttttacaatcgtatgtttttcggtataaattttagattgaattttagcaaattcatcctttttagtttctttgacatcgtcaattgcttttttgatgtctttttcaaagtcttttgtagcaccttgttcttccattaattttttaaggtctttatcctttttagcttcttctaatacagctaatgtaatttttttagtgtcagctctgctaagtgttaacgtgacaggtctaactttgtacttttcaccattaaccttaatttcttcttttttacctttatcaaaattatcgtcatctaatttgtcgacaataagttcggaatatttttcggcaattttgctgtagtcactttgttgtgcttgagcattactaaaaagagtatttaaatttagttgttggtttgtaataccattttcttttgctatttcttcatcttcacctgtaagttttgaataagttgataataaatcagaattattaacactatatttccctttaaataatggtgattcgaaataatgcttatctttatctgcagctaactggaatttccctaatgcagagtctgctattgttggttcaagattaatcattgatttctcttttttaggatcatgtccatatgacattttaattttcgatgcattaacaacagatttaggaatgccaagccctttaacaatttcatctgatgcatctgcgcttaattctaatgaagataaaaacgaattatctttcatcttttcttggaacttcacttcattttcaaaacggtcattaaaataatctttatacatttttgcagtttgttgttcactttttaagtatgtatttttcggtgtgtttgcaaaaaatgcataaactccccatgcgattccacctattaataataagacaataataataggaattataatttttaactttttagacattttgcttcctcccaattatttatgagttaatcatatcagaacaatacattttattaaatggtttattttaaattttgtttaaattaatagaattttagttataataatgtttaataagttattgaaaatctaataaactacaaaaaatagtttgattacataatgattcttgaaaaatgttggttaacttgataatatgcatttttttggcgaagaagatttatttaacttataaaaatattgaagtgagattggggagattatgaatttatggaattgaaagtcgatgattttgtaaagaatataaaaagaccgtacttaactgtattgggagtatttgtagttgcctattcattattttttgattcattgatgtttttctatggcaaactatatgataaattgcctgtatatttgctggtgtttatggcctttacagctgtaattttgattatgatgtacatacaagagaaaaatgagaattacaaagttgaaaaaagatatgtggttaaatatctcacacttaacgttattgtgggatatactttgccattgcttttggcatctatttatgtttttggggtagctggttttggatttgacgtttttaattattggctaggtatagtgatgatgctatttatttcttggttaggcttatttttattttataaaaataaatttgatagtgaaaatccgaataaagcagttaatgtcatagcaattataataaaattatttgcatttggtggattattctatattagtacaattgtacctaacactgcagatgaagaaaaatttatatatacaagtattctaataaatttagcttctgatgctcttcttgttaggtcatattttaattacgcgttatacaagagtattaagaaagatatcgaaaaagtttagataattaaagatttttgtataggggggataagtgtaatggagataaaggaaattgtagcaaatataaaaaggccgtacttaacaccttttgtaatatttacgattttgctctcattgttttttgatgcgattatgtttttcaatagtaaactttatgataagttgccattatatttagtcgtatttttaatttttgcaatagtagtgtcaattttactgtatttacaagaaaaaagtgagaaggtaaaagttgagaaaaagaatgtgattttgtatatgacactaaatgttataactggttattcaatgccattatttattgcttctacttatgttgttggtgcagcagtaaatgatatagatgtgttttattattggtgcggagtagctttgatgttatttatttcttggttaggtttatttttattttataaaaatgaatttgatagtgaaaatcctaatcctgcagttaacgccatagcaattattataaagttatttgctttagcaactatattttatataagtaaagttgcgcctagtattgcggatgaaaagaactttatatttgtaagtatactaataaatttaggtgttgatgctctacttgttaggtcatattttaattacgcgttatataagagtattaagaaagatatcgaaaatgaaggaaagacaatgtaaacgaaagacataaaaagtaataggagtctaaccatgataatttttattttaataacaatatttgctatttattatatagcaatgattgctagtttatttaaaagtgaaggtttttcaataataggtttaatattagatgttgttataatggggacattgattttttactattttataggcgctcgctttgttgatcatgatttaagcaactttttaatgttcatggatactggatcatatatttttatgtactttgcaattaagtgtttatgggtgaaacctaaggtagtaaattatttgattgcaaaagaattgggtgaatctaaagaggtcattgaagagcaggaattagatttacagacatcaaagataagaggtatctactttttcattatttcagtggtgatgttaattatcactaaattaagaatgcaacctgagttacaggcagatgctatatcgatgaatcctgtatttatttttgttggtgttataatcattttaatttggctagtactggatatatatcgcaagaaaaaatacggtatattcttattcaagacgatagtgccattagttgttacgatttggattattatagctacaattatactttcgtaaatgattttgattaatggggaatgtagagaacatttctttgtaattttataatcgaataacatacaaaataaagcgaccaattttgcagtgttacgaattgtaaactgcgaactggtcgctttttattgatgtcatgattaatttaatggatgtaattatatgatgaaacttctgaagcagagatggttcttgatgaaacgatatattcaccaatccaattcatttctgaaattagaatacttccatcaatattaactttttcaacgtaggctacatgaccaaatggaccatttactgtttgtaaaattgatcctcgtgttgggtgtctatctactttgaagccattgcttgaagcttggcctgcccagtttttagcatctccccaaaatgtactaatcgtgtgtccatctttggcacgtttatcaaagacataccatgtacattgtccagcagtatataagttgttcttacttgtgataagaggctgatcaatgattttaccgttacctaatgctaaaggtttaccgtcagcagtctttgctttgtcattaaattcggcgatttgtaattcgtcatacaattcgtctaaatcgatgcctgtaataagccctttgttatcttttgaaaaagcgttatttaattcatcgtcattgtcttcgacattcggtattgctggtgtcaaaggattgcttggtgacgtttgaggcggtgtgtgtgaatcaattgcgtcattaatgtgcgtatactgaccacttaatgaagaatggtactgattgttgttaagatcacgttgatttgcgtgttgatgattgtcgtttgtacgtgactggttttgatgattgttgtttggcgtgttgtttttgtcatatgtataagtatacgcgccggtgtctttattcactttgaactgtgcgtttgggtgtgctttctttgcttcttctaatgttttgctatcattcgtatatgcttgagccgagttaggcgacatactaaataaagtaagagttgtcatcgtcagtaaaattgttttcttcataataaccatttaatcctttatgtatttaatttaattttagtatacacatttatattacaaaaatgaatggttaattaaaaatatatgggtatattcaatatatttatttaaaaaaagctaaaaatacttaaaaaactatatacatatactaataatttatatattatttgagtaaggagcactttctcaaaaaatagtgtccctaaaaagttttgataaacttaaaatattcaggaggtttctagttatggcaatgattaagatgagtccagaggaaatcagagcaaaatcgcaatcttacgggcaaggttcagaccaaatccgtcaaattttatctgatttaacacgtgcacaaggtgaaattgcagcgaactgggaaggtcaagctttcagccgtttcgaagagcaattccaacaacttagtcctaaagtagaaaaatttgcacaattattagaagaaattaaacaacaattgaatagcactgctgatgccgttcaagaacaagaccaacaactttctaataatttcggtttgcaataagcattctgaaattggcaaagtcacattttctaatgtggctttgcttatcatttttttaagaaaacaactgaaaggaaataagcatgaaaaagaaaaattggatttatgcattaattgtcactttaattattataattgccatagttagtatgatattttttgttcaaacaaaatatggagatcaatcagaaaaaggatcccaaagtgtaagtaataaaaataataaaatacatatcgcaattgttaacgaggatcaaccaacgacatataacggtaaaaaagttgagctgggtcaagcatttattaaaaggttagcaaatgagaaaaactataaatttgaaacagtaacaagaaacgttgctgagtctggtttgaaaaatggtggataccaagtcatgattgttatcccagaaaacttttcaaaattggcaatgcaattagacgctaaaacaccatcgaaaatatcgctacagtataaaacagctgtaggacaaaaagaagaagtagctaaaaacacagaaaaagttgtaagtaatgtacttaacgactttaacaaaaacttagtcgaaatttatttaacaagcatcattgataatttacataatgcacaaaaaaatgttggcgctattatgacgcgtgaacatggtgtgaatagtaaattctcgaattacttattaaatccaattaacgacttcccggaattatttacagatacgcttgtaaattcaatttctgcaaacaaagatattacaaaatggttccaaacatacaataaatcattattgagtgcgaattcagatacgttcagagtgaacacagattataatgtttcgactttaattgaaaaacaaaattcattatttgacgagcacaatacagcgatggataaaatgttacaagattataaatcgcaaaaagatagcgtggaacttgataactatatcaatgcattaaaacagatggacagccaaattgatcaacaatcaagtatgcaagatacaggtaaagaagaatataaacaaactgttaaagaaaacttagataaattaagagaaatcattcaatcacaagagtcaccattttcaaaaggtatgattgaagactatcgtaagcaattaacagaatcgctgcaagatgagcttgcaaataacaaagacttacaagatgcgctaaatagcattaaaatgaacaatgctcaattcgctgaaaacttagagaaacaacttcatgatgatattgtcaaagaacctgatacagatacaacatttatctataacatgtctaaacaagactttatagctgcaggtttaaatgaggatgaagctaataaatacgaagcaattgtcaaagaagcaaaacgttataaaaatgaatataatttgaaaaaaccgttagcagaacacattaatttaacagattacgataaccaagttgcgcaagacacaagtagtttgattaatgatggtgtcaaagtgcaacgtactgaaacgattaaaagtaatgatattaatcaattaactgttgcaacagatcctcattttaattttgaaggcgacattaaaattaatggtaaaaaatatgacattaaggatcaaagtgttcaactcgatacatctaacaaggaatataaagttgaagtcaatggcgttgctaaattgaaaaaggatgctgagaaagatttcttaaaagataaaacaatgcatttacaattgttatttggacaagcaaatcgtcaagatgaaccaaatgataagaaagcaacgagtgttgtggatgtaacattgaatcataaccttgatggtcgcttatcgaaagatgcattaagccagcaattgagtgcattatctaggtttgatgcacattataaaatgtacacagatacaaaaggcagagaagataaaccattcgataacaaacgtttaattgatatgatggttgaccaagttatcaatgacatggaaagtttcaaagacgataaagtagctgtgttacatcaaattgattcaatggaagaaaactcagacaaactgattgatgacattttaaataacaaaaagaatacaacaaaaaataaagaagatatttctaagctgattgatcagttagaaaacgttaaaaagacatttgctgaagaaccacaagaaccaaaaattgataaaggcaaaaatgatgaatttaatacgatgtcttcaaatttagataaagaaattagtagaatttctgagaaaagtacgcaattgctatcagatacacaagaatcaaaaacaattgcagattcagttagtggacaattaaatcaattagataataatgtgaataaactacatgcgacaggtcgagcattaggcgtaagagcgaatgatttgaaccgtcaaatggctaaaaacgataaagataatgagttattcgctaaagagtttaaaaaagtattacaaaattctaaagatggcgacagacaaaaccaagcattaaaagcatttatgagtaatccggttcaaaagaaaaacttagaaaatgttttagctaataatggtaatacagacgtgatttcaccgacattattcgtattattgatgtatttactatcaatgattacagcatatattttctatagttatgaacgtgccaaaggacaaatgaatttcattaaagatgattatagtagtaaaaaccatctttggaataatgtcattacgtcaggtgttattggtacaactggtttggtagaaggattaattgtcggtttaattgcaatgaataagttccatgtattagctggctatagagcgaaattcatcttaatggtgattttaactatgatggtcttcgtacttattaatacgtatttactaagacaggtaaaatctatcggtatgttcttaatgatagctgcattgggtctatactttgtagctatgaataatttgaaagcggctggacaaggtgtgactaataaaatttcaccattgtcttatatcgataacatgttcttcaattatttaaatgcagagcatcctataggcttggcgctagtaatattaacagtacttgtgattattggctttgtactgaacatgtttataaaacactttaagaaagagagattaatttaatgttgatgaatagcgtgattgctttaacttttttaacagcatctagcaataatggcggacttaatattgatgtgcaacaagaagaggaaaagcgaatcaataatgatttaaatcaatatgatacaacgctatttaataaagacagcaaagcggttaatgatgcgattgctaagcagaaaaaagaacgacaacaacaaataaaaaatgatatgtttcaaaatcaagcgagtcactcgactcgcttgaatgaaactaaaaaagtgttattttccaaatctaacttagaaaagacttcggagagtgataaaagcccctatattcaaaacaagcaggagaaaaaaatattcccgtacattttgatgtctgtaggggctcttttgactttaggatttgtcattttttcaattcataaagggagacgaacgaaaaatgaatcagcacgtaaaagtaacatttgattttactaattataattacggcacatatgacttagcagtaccagcatatttaccgataaaaaacttaatagctttagtattggatagtttggacatttcaatatttgatgtcaatacacaaattaaagtgatgacgaaaggtcaattacttgttgaaaatgatcgactcattgattatcaaatcgctgatggagatattttgaagttactataggaggaaaaatagatggttaaaaatcataaccctaaaaatgaaatgcaagatatgttaacgcctttagatgctgaagaagcagctaaaacaaaattacgcttagatatgagagagattcctaagtcttcaattaaaccagaacattttcatttaatgtacttattagaacaacattctccatattttatagatgctgaattaactgaactacgtgacagtttccaaatacattatgacattaatgacaatcatacaccttttgataatattaaatcatttactaaaaatgaaaaattacgttacttactcaatatcaaaaatttagaagaagtaaatcgtacacgctacacatttgtgttggcaccagatgaattatttttcacaagagatggattaccaattgctaaaacaagagggttacaaaatgttgttgatccattacctgtgtcagaagctgaatttttaacaagatataaagcactggttatctgtgcattcaatgagaaacaatcatttgatgctttagttgaaggaaacttagaactacataaaggaacgccatttgaaactaaagttattgaagcggcaacgttagatttactaacggcatttttagatgaacagtatcagaaacaagaacaagattatagtcaaaattatgcatatgtacgcaaagtaggacataccgtttttaaatgggtcgctatcggtatgacaacattaagtgttttattaattgcattcttagcctttttatatttttcagtaatgaagcataatgagcgcattgaaaaaggataccaagcatttgtaaaggatgattatacgcaagtactaaatacgtatgatgatttagatggaaaaaaattagataaagaggcactttacatttatgccaaaagttatatccaaacaaataaacaaggtttagaaaaagataagaaagaaaatttacttaataacgtgacaccaaattcaaacaaagactacttattatattggatggaattaggacaaggacatcttgatgaagcgattaatattgccacttatttagatgataacgatattacaaagttagcgttgattaataaattaaatgagattaaaaataacggagatttatcgaatgataaacgttctgaagaaacgaaaaagtataacgataaattgcaagatattttagacaaagaaaaacaagttaaagatgaaaaagcgaaatctgaagaagagaaagcaaaagcaaaagatgagaaattaaagcaacaagaagagaacgaaaagaaacaaaaagaacaagcacaaaaagataaagaaaaacgtcaagaagctgaaagaaaaaaatagtataggactgaggcaaagacaatgcataaattgattataaaatataacaaacaattgaagatgctcaatttgcgagatggtaagacatatactattagcgaagacgagcgtgcagatattacgttgaaatcgttaggcgaagtcattcatttagaacaaaataatcaaggtatttggcaagcgaatcatacttctattaataaggtgcttgttagaaaaggtgaccttgatgacattacattacagctttatacagaagctgattatgcatcatttgcgtatccttcaattcaagatacgatgacaattggaccaaatgcgtatgatgatatggttattcaaagcttgatgaatgccatcattattaaagattttcaatcaatacaagaatcacaatacgtacgcattgtgcacgataaaaatacagatgtgtatattaactatgaactacaagagcaattaacgaacaaagcttacattggtgatcatatttatgttgaagggatatggctagaagtacaagctgatggtttaaatgtattgagtcagaatacagtggcatcgtcattaattcgcttaacacaagagatgccacatgcacaggcagatgattacaatacgtaccatcgttcgccaaggattattcaccgtgaaccgaccgatgatattaagattgaaagaccaccacagccaatacagaagaacaatacagtgatatggcgttccattataccgccattagtaatgattgctttaactgttgtcatctttttagtgagaccaattggtatttatattttaatgatgattggtatgagtacagtaacgatagtatttggtattacaacgtatttctctgaaaagaaaaagtataacaaagatgttgaaaaacgagagaaagattacaaagcttatttggataataaatctaaagaaattaataaagcgattaaagcacaacgttttagtttgaattaccattatccaacggttgctgaaattaaagatatcgttgaaacgaaagcaccaagaatatatgaaaaaacatcgcatcatcatgatttcttacattataagttaggtattgcgaatgtagaaaagtcattcaaattagattaccaagaagaagaatttaaccaacgtcgtgatgaactattcgacgatgctaaagaattgtatgaattttacacagatgtagaacaagcaccattaatcaatgatttaaatcatggaccaattgcatatattggtgcacgacatctcattttagaagaattggagaaaatgctaatccaattgtcaacattccatagttatcatgatttagagtttctatttgtgacacgagaagatgaagttgaaacattgaaatgggcacgttggttgccacatatgacattgagaggtcaaaacattagagggtttgtttacaatcaacgaacgcgtgaccaaattttaacgtcaatttatagcatgatcaaagaacgaatccaagctgtgcgtgaacgcagcagaagtaatgagcaaattattttcacaccgcaattagtgtttgtcattacagatatgtcattaattattgatcatgtcattttagaatatgtaaaccaagatttatcagaatatggtatttcattaatctttgttgaagatgtgattgaaagtttgccagagcatgtagataccattattgatatcaagtctcgtactgaaggcgaactgattacgaaagaaaaagaattagttcaattgaaatttacacctgaaaatattgataacgtcgataaagaatatatcgcgcgacgtttggcgaatttgatacacgtcgaacatttgaaaaatgcaattcctgatagtattacatttttagagatgtataacgtgaaagaagtagatcagcttgatgtggttaatcgatggagacaaaacgaaacatacaaaacgatggcagtacctttaggtgtaagaggtaaagatgacattttatcattgaacttacatgaaaaagcacacggaccacatggtttagttgctggtaccactggttcagggaaatctgagattatccaatcatacattttatctttagctattaattttcacccgcatgaagttgcattcctattgattgactataaaggtgggggtatggcgaacttatttaaagatttagtccatttagttggtacgattacaaacttagatggcgatgaagcgatgcgtgccttaacatcaatcaaagccgaattgagaaaacgtcaacgtttattcggagagcatgatgttaaccatattaatcaataccataagttatttaaagaaggtattgcgacagaaccaatgccacatttattcattatttccgatgagtttgccgaattaaaatcagaacaacctgattttatgaaagaacttgtatcaacggcacgtattggacgttcgttaggtattcatttaatacttgcgacacaaaaaccatcgggtgttgttgatgaccaaatttggtctaactctaaatttaaattggcattaaaagtacaagatagacaagacagtaatgaaattttaaaaacaccagatgcagcagacattacattaccaggtcgtgcgtatttacaagttggtaataatgaaatttatgaattattccaatctgcatggagtggtgcaacatatgacatcgaaggcgataaattagaagttgaagataagacgatttacatgattaatgactatggtcaacttcaagcaatcaacaaagacttgagtggacttgaagatgaagaaacgaaagaaaaccaaactgagttagaagcggttatcgatcatatcgaatctattacaacacgattagaaattgaagaagttaagcgtccatggctaccaccattgccagaaaatgtatatcaagaagatttagtagaaacagatttcagaaaattatggtcagatgatgcaaaagaagtggaattaacattaggacttaaagacgtaccagaagaacaataccaaggaccgatggtattgcaattgaaaaaagctgggcacatcgcgttaatcggaagtccaggatatggtagaacaacgttcttacacaacattattttcgatgttgcaagacaccatcgtcctgatcaagcacacatgtacttgttcgatttcggtaccaatggtttgatgccagtcacagatataccacatgtcgctgattactttacagtagatcaagaagacaagattgcgaaggcgatacgtatatttaatgatgaaatcgatcgtcgtaagaagattttaagtcagtatcgtgttactagtatttctgaatatcgaaaattaactggtgaaacaattccgcatgtctttattcttattgataactttgacgcagtaaaagattcacctttccaagaagtttttgaaaatatgatgattaaaatgacacgtgaagggctagcattagacatgcaagtaaccttaactgcctcaagagctaacgctatgaaaacaccaatgtacattaatatgaaaacgcgtatcgccatgtttttatatgataaatcagaggtgtcgaacgtagtaggacagcaaaaatttgcggttaaagatgtagtgggtcgagcattgttaagtagtgatgacaacgtatcattccatattggccaaccatttaaacatgatgagactaaatcatataatgatcaaattaatgatgaagtatctgcgatgacagaattttataaaggtgaaacaccaagtgatattcctatgatgccagatgaaattaaatatgaagattacagagaatcattaagcttaccggatatagttgcaaatggtgctttaccaattggattagattatgaaggtgttacactacaaaaaattaaattaactgaaccagcaatgatttcatcagaaaatccgagagaaattgcgcatattgctgaaattatgatgaaagaaattgacatattaaatgaaaaatatgcgatttgtatcgcagactcaagtggagagtttaaagcttataggcatcaagtggctaactttgccgaagaaagagaagacataaaagcgattcatcaactaatgattgaagacttaaaacaaagagaaatggacggcccatttgaaaaagattcactttatattatcaatgattttaaaacatttattgattgcacgtatattccggaagatgatgttaaaaaacttattacaaaaggaccagaacttggcttgaacattttatttgtcggcattcataaagaattaatagatgcttatgataaacagattgatgttgcacgtaaaatgattaaccaatttagtataggaattcgtatttcagaccaacaattctttaaatttagatttattcaacgagaacctgttattaaagaaaatgaagcatatatggtcgcaaaccaagcttatcaaaagattagatggtttaaatagcaatgaattaaataggagggaggtatgttatgaattttaatgatattgaaacaatggttaagtcgaaatttaaagatattaaaaagcatgctgaagagattgcgcatgaaattgaagttcgttctggatatttaagaaaagctgaacaatataagcgattagaatttaatttgagttttgcactagatgatattgaaagcacagcaaaggacgtacaaactgcaaaatctagtgctaataaggacagtgtaactgttaagggaaaggcgcccaatacgttatatattgaaaaaagaaatttgatgaaacaaaagctagaaatgttgggtgaagatatcgataaaaataaaaaatccctccaaaaagctaaggaaattgctggcgaaaaggcaagtgaatattttaataaagcaatgaattaatattgaggtgaagatatgggtggatataaaggtattaaagcagatggtggcaaggttgatcaagcgaaacaattagcggcaaaaacagctaaagatattgaagcatgtcaaaagcaaacgcaacagctcgctgagtatatcgaaggtagtgattgggaaggacagttcgccaataaggtgaaagatgtgttactcattatggcaaagtttcaagaagaattagtacaaccgatggctgaccatcaaaaagcaattgataacttaagtcaaaatctagcgaaatacgatacattatcaattaagcaagggcttgatagggtgaacccatgatgaaagatgttaagcgaatagattatttttcttacgaagaattaacaattttaggtggtagtaaattgcctctcgtaaattttgaattgtttgatccatcaaattttgaagaagctaaagctgctttaattgaaaaggaattagtaacagagaatgacaagttaactgatgcaggttttaaagtggctacattagtcagagagtatattagcgccattgtaaatattcgaattaatgatatgtattttgcaccatttagctatgaaaaagatgaatatattttgttgagccggtttaaaaataatgggtttcaaatacgaattataaataaagatattgcatggtggtcgattgtacaatcatatcctttattgatgagacaagaaaagtccaatgattgggactttaaacaaattgacgatgaaacattggagaacttaaataatgaaagtatcgatacgattgggcgtgttttagaaattgaaatatacaatcatcaaggtgaccctcaacaaagtttatataacatttatgaacaaaatgatttgttactcattcgatacccattaaaagataaagtgctgaatgttcatattggtgtcattaatacatttatacgagaattatttggattcgatactgatgaaaatcatattaataaagcagaggagtaatgacgttgagtggaaaaattagtgttaaagctgaaacgattgcacatgttgtaaaagaattggaaagcattagtcaaaagtatgatgaaatagctcaaaactttggaaaaatagcacaattaaattactacagtagtgaaaaagctgcacattctatggaaaatggctatagtagtgctgcaacagtcattagtggtctcaaaggtccattgagtacactcggtggtggcgtcatgaattcagcacaaaagttctttgaagcagatgaacattggggtacggaatttgccaagctttactataatattgagggataggtgcatgacatgacaaaagatattgaatatctaacagctgattatgacaatgaaaagtcatctatccaaagtgtaatagatgcaatagagggtcaagacttcttagatgtagatacaacaatggatgatgcggtaagcgatgtcagttctttagacgaagatggcgcaatatcattaacaagtagtgtagtaggtccacaaggatctaaattaatggggtattatcaaaatgagttatatgattatgcatctcaattagatttgaaaatgaaagaaattattgacacgccatttatagaagatatagataaagcattcaaaggtataacgaatgttaaattggaaaatatactaattaaaaatggtggtggacatggtagagatacctatggggcttctgggaaaattgcaaagggagatgccaagaaaagtgacagcgatgtttatagcatcgatgaaatattaaaatcggatcaagaatttgtaaaagtaattgatcagcattacaaagaaatgaaaaaagaagataagaaattatctaaaagtgattttgaaaaaatgatgactcagggcgcttcttgtgattacatgacagtagctgaagcggaagagctagaggagcaaaagaaaaaagaagaagctatagagattgaagcactagctggtatggtagttttatcttgtattaatcctgttgctggagcagtagctattggtgcttattccgcttattcagcagcaaatgcagccacaggaaaaaatattgtaactggaagaaagctatctaaagaagaacgaatcatggaaggactttcgcttattccattgccaggtatgggcttcctcaaaggtgctgggaaaagtttaatgaaattaggcttcaaaggcggagaaaaatttgcagttaaaacaggattgcaaaagacaatgcaacaagcagttagtcgtatttcacctaaaatgggaatgatgaaaaacagtgtgttgaatcaatctcgtaactttgctcaaaatactcatgttggacaaatgttgagtaacatgcgtggtcaagcaactcatactgttcaacaaagtagaaattggattggacaacaagcacaaaatgtcaaacgaatagtgaataatggacttgataaagaaatagcacatccatttaaacaacaacttgcaccagcgggaatgggtggtataaaatttgctgaaacaactactttgagaaacatgggtcaaaacataaagcgtgctgttacaccacaaaatcacgtgacacatggtccaaaagatagtatggtgagaagtgaaggcaaacatagtataagtagccatgaaatgaaatcatcaaaatatgttgaatcaccaaactacaccaaggttgaattcggagaacactatgcaagacttagaccaaagaaactaaaagcaaatatagaatatacaacaccaactggtcacatatatcggaccgatcataaagggcgtataaaagaagtttatgtagacaatctttctctaaaagatggcggtcgtaataaccatgcacaaagaactgtggggggagaggatagattaccagacgatgatggtggtcacttaatcgctagaatgtttggtgggtcaaaagacatagataaccttgtagcacaaagtaaatatatcaaccgttcatttaaggaaaatggtgattggtacaagttggaaaaactatgggaaaaggcaatcaagtctggaaaaccaatagaaaatattaaaatagaagttaaatataaaggtaatagtcaaaggccaactatatttaaggttggatatgagattaataatgaacgaaaagttaaaacaatagaaaatatatagaggtgttagtatgacatttgaagagaagcttagcaaaatatacaatgaaattgcgaatgagattagcagtatgataccggtagagtgggaaaaagtatatacaatggcttatatagatgatggaggaggtgaagtattctttaattatactaaaccaggtagcgatgaattgaattattacacgaatatatctaaagattataatgtttcagaggaaatatttgatgatttatggatgaatctgtattacttgtttaagaatttaaggaatttatttaaagaagaaggtcttgagccatggacatcatgtgaatttgattttacaagagagggtaaattgaaagtatcatttgattatatagattggataaatacagagtttgatcaattgggccgtgaaaattattatatgtacaaaaaatttggggttataccagaaatggaatatgaaatggaggaggttaaacaaatcgagcaatatattaaagagcaagaagaatagacaatcttcatgagagactaaacaataaagctttgtttagtctttttagcgtttaagtaaaaagcaatagataccgtaaagttgatgctcatcaaataataatataaagataattttaggtttttaaacttttaatcgaaaagaatctaagtttatagctttaaatacgtaatatgctatttaaaaaataatgtataggagatagatatgactactaaggaaaatatagacattcttcgaaagccaggtgcacaagccttaagtttaatatcattgtttttgatacttttttcatgtctaactttcttttttggtttagattatgaaaggtttccaaactatttaaagataacgacaattatagaattaataattattgtaattagtttacttcaatggattaggtttatagatttcgaaaaagaaagtgcacagaaatataaaaaaatatatgctcgatttttagttattataaatgtgttaactacgatcactgtagtatttgcactgtgtaacctttattattttgcagctgtacaaaaccattatgatttattcaattattggttaatgggtacgatttcaatcataattagctatttattattagtaattggcggaatgtttacgttgttaaaattacctaaagtaacaaaacgctggggtggtaaaactaaaacacatttcggtttattattaactgcgttgagctcatttatatatattgaaaaaattatcgaatatatattgattcctaatgtcgtagaatccaagtttataattattgtgagcatgttggttatcgctggagcacaatttgtggcatttcaatttattatgcaatacagtagattctatatttttgaattaaatacagaagatgatgactaaatgattttgtaaattctgtgaagtatacttatataagaaaatcaacttcaacgtatatcaccatattattttatactcaatgatgtgaatggatttaagtggattgatattaaagtaaaagttatggaatattgaggtgcgaatatggagttcttattattaattgtcgtagccggactgtattatattatatatttaactgctgtgatgtattctgaaaaaatagtagtattgcctataatcatctatgccattgtgtttgtaataattggtatcacttatatctttataggcgacagctatgatcaattaacaaatttcaatgtgattttgtatatggggagtttgttttatgcatggatggcttttagaaatctttggaacagaccattattattaaaatataagaatattacagatagttcaagtggaatagttaataaatctgaatacaattcagttgaaagcttacgtataaacattgaaatagctaagtataaagggattatttctttgatagtagctatagtactaacggtactaatgacattaaagtcaacacctcaaatcactgcagaaacacgtgacttaagtatctcatttttcatactcagcttatttatcattgttatatttgctgtttgggatttaattattagagttagaaaaggagcgtttacttttgttgtaataaggccaacattattcagttgttggttatttattttgaatatgattttatcaagattattataattatattacatataggtatgcgtgaattttatttgcgaaagtttaaaaaaatatatactattaatatgtttcgtactataattgtaaatagttaaatgaatttcaattattgtaacaatagtttcagttattttattttcattagtgtatttaggtttaaaataagtaatattaatttatagaagcattaagcgacgtagaggtgttgtttaatgctttttatttaacggtaatgaaaatataggggagataacatgactttcgaagaaaaactaagtcaaaagtacaacgagattgcgaataagattagcagcatgataccggtagagtgggaaaaggtatatgcaatggcatatatagatgatggaggaggagaagtgttctactattacacagaacctggaagtaatgaattatactactatactagtgtattaaataaatatgatatatcggaatcggaatttatggattcagtgtatgagttgtataaacaatttcaagatttaaggaatttatttaaagaagaaggacatgaaccatggacatcatgcgaatttgactttacaagagaaggtgaattaaaagtttcatttgattatattgattggataaattcagaatttggtcaagtaggtcgacaaaattactataagtatagaaaatttggaattttaccagaaacggaatatgaaattaataaagttaaagaaatcgagcaatatattaaagagcaagatgaagctgaaatataggggagataacatgaatttcgaagaaaaactaagtcaaaagtacaacgagattgcgaatgagatcaatggaatgataccagtagactgggaaaaggtatatgtaattgcatatgtggacgatggaggtgggcaagttatattttattataccaagcccggaaatgatgagctgtattattattcgagtatcgttgaagattataatgttttagaagaagtctttgatgatttatggatggaactttatagatcatttaaaaaattaagaaatatatttaaagaagaaagtcttgaaccatggacatcatgtgaatttgattttacaagcgaaggtaaattaaaagtatcatttgattatattgattggaagaatacagaatttgatcaattaggccaagaaaactactataactatagaaaattcggaattataccagaaatggaatatgaaatggaagaggttaaacaaatcgagcaatatattaaagagcaagaagaagctgaacaatagaggcgaaaacatgactttcgaagaaaaacaaagtgaaatgtacaataaaattgcaaatgagattagtggaatgataccggttgagtgggaaaaggtatatacaattgcttatgtagataatcaaggtggagaggtcatttttaattatactaaacctggaagtgaagaattgaattattattcagatattcctaaagatttcaatgtctcaaatgatatttttatggatttatggatgaaagtttatcggatgtttgatgagttaagagaaacttttaaaaaagaaaggtttgaaccatggacatcatgtgaatttgattttacaagagatggtaatttgaatgtatcttttgattatatagattggttaaatacagaatttgatcaattgagtcttgaaaattattatatgtacaaaaaatttggggttataccagaaatggaatatgaaatggaagaaattaaagaaatcgaacaatatattaaagagcaagaagaagctgaacaatagaggcgataacatgactttcgaagaaaaattaagtgaaatgtacaacgagattgcgaataaaattagtagcatgataccagtagaatgggaaaaggtatatacaatggcttatatagatgatggaggaggtgaagtattctttaattatactaaaccaaacagcgatgaattgaattattacaccgatatacctaaggagtataacatttctgtgcaagtatttgatgatttatggatggatttatatgatttgtttgaggaattaagaaatttatttaaagaagaaggactagaaccatggacatcatgcgaatttgattttacaagagaaggtaaattaaaagtttcatttgattatatagattggataaattcagaatttggtcaaataggtcgacaaaattactataagtatagaaaatttggaattttaccagaaacggaatatgaaattaataaagttaaagaaatcgaacaatatattaaagagcaagaagaagctgaacaatagaggcgataacatgactttcgaagaaaaattaagtgaaatgtacaacgagattgcgaataaaattagtagcatgataccggtagagtgggaaaaagtatatgcaatggcatatatcgatgaagaatgtggagaagtgttttacaattatactgaaccaagcagtgatgaattattttactatacaagtgtgataaagaagtataatttattgaaatcaagctttatggattcagtatatgagttgcatgatcaatttgaggaactaagggaaatatttaaagaagaaggtcttgaaccatggacatcatgcgaattcgactttacaagcgagggtaaattaaacgtatcttttgattatattgattggactaaattagaatttggacaaatagcaaaagaaaattattatatgtacataaaatttggaattttaccagaaacggaatatgaaattaataaagtaaaagaaatcgagcaatatattaaagagcaagaagaataaactatcttaatgtaagactaaacaataaagctttgtttagtctttttagcgtttaagtaaaaagcaatagagaccataaagttgatgctcatcaaataataatataaagataattttaggtttttatacttttaatcgaaaagaatctaagtacttataactttaaatacttaatatgctattacaaaatcaatgtataggagataggtaaatatgactactaaggaaaatatagacattcttcgaaagccaggtgcacaagccttaagtttagcatcattatttatgatacttttttcatgtctaactttcttttttggtttagattatgaaaggtttccaaattatttaaagataacgacaattatagaattaataattattgtaattagtttacttcaatggattagatttatagatttcgaaaaggaaagcgcacagaaatacaaaaaaatatatgcccgatttttagttgttataaatgtgctaactactatcactgcagtatttgcaacatgtaatctttactattttgttgctgtacaaaatcattatgacctattcaattattggttgatgggtacgatttcaatcataattagctatttattattagtaattggcggaatgtttacgttgttaaaattacctaaagtaacaaaacgttggggtggtaaaactaaaacacatttcggtttattattaaccgcgttgagcgcatttatatatattgaaagaattatcgaatatatattggtgcccaatgtcgtagaatccaagtttgtcataatggtaagtatcattattattgcttgtacacaatttgtagcctttcaatttattatgcaatacagtagattctatatttttgaattaaatacagaagatgatgactaaataattttataaattactgttggagtatacttatataaaaaatcaacttcaacacattattttttactcaatgatttgaatggatttgagtggattgatattaatgggatttgattattagatttagaaaaggaacgtttgcttttgttgtaataaatctaatagttttcagttgttggttatttattctgaatatgattttatcaagatcgttataattgcattacatatagttgttggtaaatttttatttacaaaatggtaaaaaagtatatactattaatatcttttttactataattaaaaatagttaaataaatagaaagacaaaataatgagtaggagttttagggttattatttacaaataatataatactaaaaaagactcgaaattatttggaattccagttatcgtaacaatagttgcagttattttagttccattagtgaatttaggtatgaaatgagtaatattaatttgaagaagcattaagcgacgtagaggtgttgtttagtgctttttatttaacggaaatgaaatcaatatctattttgaaaatataggggcgataacatgactttcgaagaaaaactaaatgaaatgtacaacgagattgcgaatgagattagtgggatgataccagtagagtgggaaaaagtatatacgatagcctatgtaaatgatagaggtggagaggtcgtttttaattatactaaaccaaacagcgatgacttgaattattacacatatatccctagagagtataatgtctctgaaaaagtattttatgatttgtggacggatttatatagattgtttaagaagttaagaaacgcatttaaagaagaagatttagaaccatggacatcatgcgaatttgattttacaagagatggtaaattgaatgtatcttttgattatattgattggatgaattcagaatttggaccaatgggaagagaagattattacatgtataaaaagtttggaatttggcctgaaaaagaatatgcaataaatagggttaaaaaaatagaagattatattaaagaacaagaagaaactgaactataggggagataatatgactttcgaagaaaaactaagtcaaatgtataacgagattgcgaatgagattagtgggatgataccagtagaatgggagcaagtatttacaatagcatatgtaactgatcaagctggagaagtcatttttaattatactaaaccaggtagtgatgaattaaattattattcagacatacctaaagattgtaatgtatcaaaagatatttttaagaattcatggtttaaagtttatcgaatgtttgatgagttaagagaaacttttaaaaaagaagggcttgaaccatggacatcatgcgaatttgactttacaagagatggcaaattgaatgtatcttttgattatattgattgggtgaatttagaatttggaccattagcaaaagaaaattattatatgtacaaaaagtttggtgttttaccagaaatggaatatgaaattaataaaattaaagaaattgagcaatatattaaaagccaagaaagttaattatgggaaagaggttaagcaataagatttgtttaatcttagtttgctgcaatttaaaattgttgatatttctaggaagaatcattcgaaattggaagagaaaattgagagtgaactcataagtggctcaataacgaattgtataaaaaatattgatgataatatcgatagactcatcgataaaattaccgagatgcaaaatgaagttaattcattaggtagtacattatctgtactagaaaatgcaataaattcaatagctgctgctattgaaaaattaactaattaaaggagtagaaatggaaaaaataaagagaataaacaaaatatttttatcatttgaagttattccatttgcaatgatgattttactggcatttccaccaattattgcaagtctaattaataatcgtttgcagtatggtagggattttggcgatagagtaagcttttattgttatatttcaattatggttgcatatgcaattaccattttgttagaaattattttttactttattttattgaaaaactatcaatatgatcaaaataatattgaattggctaatagagtgaaagttacaaaagtactgtcgattttgtatatgattcccggattatatgcgattgcatgctattttagatttatacatgttcgctcatttagagaaaataaaaaatctggacagccggcctatcacttttgggaattttttataaaacctaatcgcaaaccgatagagttgaaagacttttttattaaaaatagataattaaggagtaaccaatgaaaagattaattataggagtgttaattataatgatgagtataatcaattatggttgtggcaataatcaaaatgaaaataaatatcaaagtcaaattaataaagtaatgaaaattcaacaagaaactcataaagagatggttaaaaagagtaatgaagttaatcctgaatttaataaggataaagtaaatacttatgtatttaatgatggcaaattaattatcataagctataagttatttaaagataaagatcaaatgttttacgcgacttacgagtttaaaaacgacaaaatttattataagagagatattgatcctaaaacatacgtgaaagaacaccaatcagattataaagatattaaagtaaaataatttaaaggagtaggaaaatggaaaaattaatcaaagtgacgtctttaattggaattattattcaaagttttttaacattgttatttttattatttttaattttatcagcaacaggcattatacagccagaattgaccacaactgttaatggtgaacaaactatacaaagcccagaaactgctcaagcaacattcgtgacaatattcgcaatattatttgttgtttctttagtttcagatttattaggcattatagctatgaaaaagttgtttgtgaataataaagcgagtggtattttgtatattattggtgcagtgatcagtgccaatttattaacatttattgcttggttaataagtgggatttctgttttaagatataacaaaataggaaaagaagtgtcatagcatgaaatatacttggtggatacttttaacaattgcagggattttaagtttaacaagtatttatggatttattttatgtttaggtagctttggaatgttggcactgaatgtcatgtggctatttgtttatacaccgcataaaaattctaaagcacttgaatctatatcaaaaccaaccataattttatcaatcattgggacatatgcagtatttatatttatgtctatcttattttacttcgtaatgaaagctaggtttatggaaattggaataaaactttacggtgaatcctttaatatgtttggaataccattattcattattgctatcattttatttacaatcggtacagtattcgtttataaaatacagcaatcaagattaaagcagtagaatatattaatttaaaatgggacgggtttaaaagaaatccgtcctaatgatttatacataatagatgtagttgaatctatatgactcaaatactttgaagataaaaagataatgacaataaatgtaaaatgtgatttttacaatattaaaatataaaaattctaactgaaaatgtaatggtttagaaatcgaatctaaattttaataatgattaatgaaaggtagataaacatgagtaactcaaacgagtttgataaatttgctccttcatttatttgcgttgaaaatcacgagtctgtttccatttctgaaaaatggaaacgagtattgtaagtaaaaactctgaaggatttaagaaaaatatatagtttcaagatgatgaaccaatttagggtgaaaatttaaatggatgcatatatttagattttactgaattgtaaaaatagaatttcaagttatttgaatgtatttataaatatatcgttattattaaagtagagattaggggagataacatgactttcgaagagaaaataagcaaattatataatgagattgcgaatgagattagcagtatgatactggtagagtgggaaaaagtatatacaatggcttatatagatgatggaggaggtgaagtattctttaattatactaaaccaggaagtgaagatttgaattattacaccgatatacctaaggagtataatgtttctgtgcaagtatttgatgatttatggatggatttatatgatttgtttaagaatttaaggaatttatttaaagaagaaggactcgaaccatggacatcatgtgaatttgactttacaagcgaaggtaaattaaaagtttcatttgattatattgattggataaatacagagtttgatcaattaggccgtgaaaattattatatgtataaaaaatttggggttataccagaaatggaatacgaaatggaagaagttaaagaaatcgagcaatatattaaagagcaagatgaagctgaactataggggagataacatgactttcgaagaaaaactaagtcaaatgtacaatgaaattgcgaatgagatcagtgggatgataccagtagagtgggaaaaggtatatacaattgcctacctagatgatgaaggtggagaagtcgtttttaattatactaaaccaggtagcgatgaattgaattattacacggatatatctagagattataatatttcagaagaaatatttgatgatttatggatgaatctttattacttgtttatgaatttaagggatttatttaaaaaagaagatttagaaccatggacatcatgtgaatttgactttacaagagaggggaatttgaaagtatcttttgattatattgattggattaaattaggttttggaccatcaggaaaggaaaactattatatgtacaaaaagtttggtgttttaccagaaacggaatatgaaattaataaagttaaagaagtagagaagtatgttaaagagcaagagtagcatatatgttatagaaggctgtgcaaaaccaacctcgttttacatttgactcaaagaagaaggtaaacgataagattatttgcaacttaaaaagtctattagcttctcggtatccatacatcatatgtataaatgagtttaactaattaataaatcacgatataaatttaaaattgccattaattgaaaaggttattgtagtgtattttataaagttgatgcacatcgacttattttttaaaacttatatcaaaaaaatatgagaaaagtatatactattaaaatgttttttactataattataaatagttaaatatttggagattaaataaatatataggaggcaatttttagagatacatagcaatgtataggcatcaaatagttattgcataatttattatgatgacataattttcagtaaatagttgtaaattaacactgaaatagatgtttatattaagaagactttaatatcataattaatcaaaatcttgcgtcaaacatttaaacgaattttaagttgataacaattggcaaaacattgttcaaacatcacaatgataaagcatattatcagtattgtagtgtgtggaaaatgacagccatctaaggagaaaaatgatgaaaagaatattggtagtatttttaatgttagcaattatattggcaggttgttctaataaaggtgaaaagtatcaaaaagatattgataaagtgtacaaagaacagaatcaaatgaataaaattgcctcgaaagtacaaaacactattaaaacagacattaaacaagaagacagtaatacacatgtttataaagatggtaaagtcattgttattggtattcaattatataaagatcgtgaaaaaatgtattatttcgcatatgaaataaaagatggtaaggcagaaatcaatagagaaatagacccaattaagtatatgaaagaccataaagcagattatgaagatgaaaatgtagaagtggaaaaagattaacgtatgctttctttaaaacttttaaccagcttcaaaaaataaatgagctttagcgacaataatttttaaaataaacacgatataaatttaaacatttatatataagaacacaaacgtaagtttgtaaataataataaaggagtaagtcaatggaaaaatcgatcaaaataatgacaataataggaattgtgattcagggtttagcaacggtatttagtttactattgatggttttagcagcatcaggtgtaatgactacagatgtgtcaacaacagttaatggtgaggttgacccagttgatgcagaaacagcagcagcaattttcactgtattattcttatccctattcatatttggaatcatttcaattattttaggtgcaatcggtatgtttaaagcatctaaaaacaaaaaaatgagtggtatattgttgattattggagctgtaataagtggtaacataattacatttgctttatggttagtcagtggtattaaactccttactaataacaagcctaaagatgaaataagcgacttatcataaacatcgtatattgaaatttcaagatttcttaagtaattaaataaagtgctctcttagaagtagattttcagtcaataactgcttttaagagagcattttgtatttgataatgctcatagcatcggacaaaaaccattgacgaactttaaaaaaatacgttagacaatgcacttctaaatattaaaggcatcgactaacgcattgttcaaatagagttaattatttttataaaattgatgatgatcattcaagtaagcatagaataaacctataatgagtcctcctccaatatagttaccgataaaagccgcagcgatattcgaaatagctggtatgaagtgcaatgtatcaacttgataaattaaaccacccataaataagcaactgttgtaaacgacgtgttcataacccataaaggcgaatatggtaacaccgaacatcatgacaaacatttttgcgagtacatcgtcaatttgcatggcaataactaatgaaatattgataaagaaattggcgaatatcgctttcattaatatacttacaaaaccagtagacaacgttttgtgctcaataactgctgataactgatttaacatatctggcgtcattacatttgaaaaacgcatgaaactaaataaaatagcagcacctaaaatatttcctgcaaagcataataaaaatattttcaatactctagttggtttaattactttataatacaggcctacagtaaagtacatgaagttactggttagtagttcggagtttgtaaataaaatgagtactaacgcaaagctgaatgtaatggcactggccatattcacaatgcctggcggtaaatctggttcgtgtgttgctttaactgataatacgaagaccgtaataatcccgataataaatcctgccatcatagcgcgtaataaataacgttttaaataaacgctttgtaatatatctttcgttcttatcgtttcgactacgttatttacccagtcgtccccataaaatattttatcccatttaatatgtttctccttcacaatgacatcctcacttttcatttgttaatcagagtatactatgaatctccttatttgtgaataatttcacaaaattaattttaaaaactaatatttttgaatatcagctaggattttttaacaaatcatttattttaaaataattaatagacagacggtatcactgaaaagtcatgaatttcatataaaaaatcctagtaacgatgggtcaatcattactaggcagtgagcatttattaagttgtcgcttgtttcggacgacgtataaatacatcgatgatgaaaccgataatagcaaagagcatgaatggtacaagccaagctaaatcgatatctgctaaaggtaacatcataaaccatttcaaaataacaccgtgtaataagttgaaactatttagtatttgtaaaattgaaataatcaatgtaataacagttgcgagtcgataggcccaactgaatctgaatgtgctaaacatgttagcaaatgatatgagtacaagtgcaatcgacacgggatatattaatgtcaacaatggtacagcaatttttaaaatcatttctaaaccaagtgttgtaaataagaaccctatgatagagaaaataagtgcgaatattttataagaaaacttaggtacgtgtttcttagtaaatgtggcgcaagcattgacgagtcctatacatgtggttaaacatgcaagtatcactgtcataccaaatactatgttgccaaatgaaccaaatactcgtaatgagttgtacgtcaatatatctgtaccatctttaaagtttcctggagctgttgatgccccaacgtatgcaagtgcaaagtaaatcattccaagtaatatggctgcaataagacctgaaaagcagacatattttaaaattttcatgcgatctgtgaggcctttaaacttatagccattgacaatgactacggaaaaagctaacgcagcaacaagatccattgtaaaatagccttccaaacttcctgaaatgaaaggatgtgttatatatttatccttaggtgcacttagtgcagattcagggttgaaaatgacagcaatacttaatagagcgaccattaatagtaataacggtgttaataatttacctaaattatcaacgattttcgatggatttaaactaatccagtaaacgatggcaaaaaagattgctgcgaatataattaaagtccattggttatgcacaggtaaaatgtgtcttgtaccaatttcgtacgcgacatttgcagcacgtggaataccgtaaaatgctccgatagacatgtaaatcacgacagcaaaaataaacccgaaccatggatgtatacgattgcctacactttcaacaccttcatcataaaatgcaacaacaataacagtaataaaggggagtaatatgcctgtaagagcaaagcctagcataccaatccacatattttgacccgctgtatggccaagcatgggcgggaatattaaatttccggctccaaaaaatagtgaaaataacatgaggcccgaaataataacttgttttttcaatgtaatttccttcctaaaactagatattcataataatttaaaaaatctgaaaaataaaaacgttcttactttatctttaaatgacaatactatgattctattattttataaaaaagattgcaataataacgtcttgctattattggataatgacaattaaagtgtcgtttttatgaattaaaataggtgaaagtaagttggaaatacgttggagcgttgtgatttttatgagaaattgtatgagtgaggactgctatttataaaaggtaaactatggatgagtttatggttgttccaataggtaaataagagatagcacactgtacacaaaatgatacgtggatgagtgaatatgtctgataggaaggcctagtcactcaaatgaatttaagtttattacgtgataaatcacaaatctctctcatgtgataggtctcccattaaatcatgcttatatgaaatgttcacatatttgttagcttttcaagaaataatattaaatatcttttcatagtatagcaatattaaataaatgcatttataattttaactgtattttaaatattaatcatgaggtgataagatgaataaaatttcaaagtatattgcaatagcatcattatcggtagcggttacagtttcagcaccacaaacgacaaattctacagcgtttgccaaaagttctgctgaagttcaacaaacgcaacaagcttctataccagcatcacaaaaggcgaatcttggtaatcaaaatattatggcagtggcttggtatcaaaattcagctgaagcaaaagcattatatttacaaggttataacagtgcaaagacacagttagataaagagattaaaaagaataagggtaaacataagttagctattgctttggatttagatgaaacagttttagataattctccatatcaaggctatgcatcaatacataataaatctttcccagaaggttggcatgaatgggtacaagctgctaaagctaaacctgtctatggcgcaaaagaattcttgaaatatgctgacaaaaaaggtgtcgatatctactatatttctgatagagataaagaaaaagatttaaaggcaacacaaaagaacttaaaacaacaaggtatccctcaagctaagaagagtcatattttactaaaaggtaaagatgataagagtaaagaatcacgcagacaaatagttcaaaaggatcataaacttgtcatgctatttggagataatttattagactttacagatccaaaagaagctacagctgaatctcgtgaagcattaattgaaaaacataaagacgatttcggtaagaaatatatcattttccctaacccaatgtatggtagttgggaagctacgatttacaacaataactataaagcaagtgacaaagcaaaagataaattacgtaaaaatgctattaagcaattcgatcctaaaacaggcgaagttaaataatatatgaattggacgtctacatgtacttaaaggtatatgtaggcgtttttaaattgatccttaattttaaatgtaccgtacaaaaataatagacaattaattgcattttccataaatttgcttttaatataaaaagttcgggtataatgaaggataagtgtatgtataacattacagagcgcaacacgacgtacgtgcatctaagaatataaacaatgtttaaatcatagtagtagggagagaaatgcatgtttttagcttggaatgaaatacggcgcaacaaattgaagtttggactaattattggtgtgttaacgatgattagttacttgctatttttattatctggattggcgaatggtcttatcaatatgaataaagaaggcattgataagtggcaagcagatgccattgttctaaataaagatgccaatcaaactgtgcaacaatctgtttttaacaagaaagatattgaaaataaatacaagaaacaagctacattgaagcaaacaggagaaatagtttctaatggtcatcaaaaagacaatgttttagtgttcggtgttgaaaagtcatcacttttagttccgagtttaatagaagggcataaagcgactaaagataatgaagtgttagctgatgaaacacttaaaaataaaggatttaaaattggcgacacattatcactatctcaatcagatgaaaaattgcatatcgtaggttttacagaaagtgcaaaatataatgcgtcaccagtcattttcacgaatgacgctaccattgccaagatcaatcctagattgactggagataaaattaatgcagttgttgtacgtgatacaaattggaaagacaaaaaattaaaccaagagcttgaagcggtaagtattaatgactttattgaaaatttaccaggttataaaccacagaacttaacattaaactttatgatttcattcttatttgtcatttcagctacagttataggcattttcttatatgtcatgacattacaaaaaacaagtttatttggcatattaaaggctcaaggatttacgaatggctatttagcgaacgtagttatttcgcagacgctcatattagcattatttggtacggcatttggcttactgttaacaggcgttacaggtgcatttttacctgatgcagtacctgtcaaattcgatgtactaacattgctcgtatttgcaattgtgttaatgattgtctctgtattaggaagtttattctccattttaacaattagaaaaatagatccgttaaaggcgattgggtaggaggtgtagcaaatgttgaaatttgaaaatgtaacaaagtcatttaaagatgggaatcgtaacattgaagcggttaaagatacaaattttgagataaataaaggtgatattatagcattggttggaccttctggctctggtaaaagtacatttctaactatggcaggtgctttacaaacgccgacatctgggcacattttaatcaataaccaagatattacgacaatgaagcaaaaagcattggcaaaagttagaatgtctgaaataggttttattttacaagctacaaaccttgtaccatttttaacggtaaagcaacaatttacattattgaaaaagaaaaataagaatgttatgtctaatgaagactatcagcaacttatgtcacaattaggtctaacttcattgcttaataagttaccttcagaaatttcaggtggtcagaaacaacgtgtggcgatagccaaagcgttatatacgaatccgtcgattattttagcggatgaacctaccgcggcgttagatactgaaaatgcgattgaagtcattaaaattctacgtgatcaagccaaaaaaagaaagaaagcatgtattattgttacacatgatgaacgacttaaagcatattgtgatcgttcatatcatatgaaagatggcgtccttaatcttgaaaatgaaacagtagaatagttttattaagccggtacatcatgtgccggtatttttatgtttatgtattatttgaataaactttcacattcaattaataataattattatcgaaaattagaaatattccgtgaaatataatattttttgtagtaaaatggcctctaagtattcaatatttaaatatggggattgaatataaaattatcgtaatgggggtcaatggttatggatttaatgataggtactttatttttatttttggtcttagtgatttttacattatttacatataaagcacctaatggtatgcgtgccatgggagcattagctaatgcagcaatcgcaacatttttagtggaagcatttaataaatatgttggtggcgaagtattcggtattaaatttttagaagagctaggagacgctgcgggaggtctaggtggtgtcgctgccgctggattaacagcattagctatcggtgtatcaccagtatatgcattagttatagcagccgcgtgcggtggtatggatttattaccaggtttctttgcgggttatatgattggatatgtgatgaaatatacagagaaatatgtgccggatggtgtcgacttaattggatcgattgtcatcttagcgccattagctcgtcttattgcagtattattaacgccagtagtgaatagtacattgattcgaattggtgatattatccaaagtagtacgaatacgaatccaattatcatgggtatcattttaggtggtattatcacggttgtcggcacagcgccattgagttcaatggcattgacagcattattaggtttaacgggtgtacctatggctattggtgccatggcagcatttagttcggcatttatgaatgggacgctattccatcgcttaaaattaggtgatcgtaagtctacgattgcagtaagtattgaacctttatcacaagcagatattgtatcagccaatccaattccaatctatattacaaatttctttggtggtgcgattgctggtttaattattgctatgtcaggtttaattaacgatgcgacaggtacagctacaccgattgcaggatttttagtaatgtttggatttaatcatccaatgactattgtaatttatggtgtagtaatggcgattgtaggtgcgcttgcaggttatcttggttcaatcgtatttaaaaaatatccaattgttactaagcaagacatgattaatcgaggtgcagttgacgcatagcatcatcatattgaatagtaaaaacaaataaaacatagtaacgtgattcagtcgatgtaaaaatcgataatgagtcacgtttttttatagaaaaatataagacataaaaatgtcataatttattgtcgacaaatatcatactgtataaacatttatcattttctcaagtaccttttacacgatggaatgaacttactttttacgaaattatgcgtattttataaacaaatatcattgatataacggcaaatgtaagcgtttacaacagaaataacagcatgctacgatatttttgtaaattcactgattcaagtattttaagtcaatatgaggagggatgttatgagcgattctgagaaagaaattttaaaaagaattaaagataatccgtttatttcacaacgtgaacttgctgaggcaattggattatctagacccagcgtagcaaacattatttcaggattaatacaaaaggaatatgttatgggaaaggcatatgttttaaatgaagattatcctattgtttgtattggcgcagcgaatgtagatcgtaagttttatgtgcataaagatttagttgcagaaacatcaaatcctgtaacgtcaacacgctctattggtggcgtagcaagaaatattgctgagaacttaggtaggcttggcgaaacggtcgcttttttatctgctagtggacaagatagtgaatgggaaatgattaaacgattgtccacaccatttatgaatttggatcatgttcaacaatttgaaaatgcgagtacaggttcatatacagctttaattagtaaagaaggcgacatgacatatggcttagcagatatggaagtgtttgactacattacgcctgaatttttaattaagcgttcacacttattgaaaaaggctaagtgcattattgtcgatttgaatttaggcaaagaggcattaaacttcttatgtgcctataccacgaaacatcaaatcaaattagttatcaccacggtttcttccccaaaaatgaaaaatatgcctgattcattacatgctattgattggattatcacgaataaagatgaaacagaaacatacttaaatttaaaaatagaatctactgatgatttaaaaatagctgctaaacgctggaatgatttaggtgttaaaaatgttattgtgacaaatggcgtgaaagaactcatttatcgaagtggtgaggaagaaatcatcaagtcagttatgccatcaaatagtgtgaaagatgttacaggtgcaggcgattcattctgtgctgcagtagtgtatagctggttaaatgggatgtctactgaagatatattaattgctggtatggttaacgcaaagaaaacgatagaaacgaaatatacagttaggcaaaacctagatcaacagcaactttatcacgatatggaggattataaaaatggcaaatttacaaaagtatattgagtattctcgagaagttcagcaagcacgggagaacaatcaaccgattgtagcattagaatcaacaattatttcgcatggtatgccgtacccacaaaatgttgaaatggcaacaacagtagagcaaattatcaggaataatggtgccattccagcaaccatagccattatagatggcaaaattaaaattggtttagaaagcgaagatttagaaatactggcaactagtaaagacgttgctaaagtatctagaagggatttagcagaagttgttgcgatgaagtgtgttggtgctactactgtagcgacgacgatgatatgtgctgcaatggctggtattcaattttttgttacaggaggtattgggggcgtccataaaggtgcagaacatacgatggacatttcagcagacttagaagaactgtctaaaacaaatgtcactgttatctgtgcaggtgccaaatcaattttagacttacctaagacgatggagtatttagaaacaaaaggcgttccagttattggatatcaaacgaatgaattgccagcattcttcactcgcgaaagcggtgttaagttaacaagttcggttgaaacgccagaacgacttgctgacattcatttaacaaaacagcagttaaatcttgaaggtggcattgttgttgctaatccaattccatatgagcatgccttatcaaaagcatatattgaggcaatcataaatgaagctgttgttgaagcggaaaatcaaggtattaaaggtaaggacgccacaccgttcttgttagggaaaattgtagaaaaaacgaatggtaaaagtttagcagcaaatataaaacttgttgaaaacaatgcggcgttgggtgctaaaattgctgtcgctgttaataaattattgtaggtgatgatacatgaatattttattcgctatcacagggatagcatttgcactatttgttgcgtttttattcagttttgatcgtaaaaacatagacttcaaaaagacgttaataatgatatttattcaagtgttgattgtgttatttatgatgaacacaacgattggtttaacaatcttaactgcattaggctcattttttgaagggttaataaatgttagtaaagcaggtataaactttgtttttggagatatacaaaataaaaatggctttacgttctttttaaatgtgttgctgccattagtgttcatttctgtattaataggcatttttaattatattaaggtattaccatttattatcaaatatgtaggtatcgctattaataaaataacgagaatggggcgcttagaaagttactttgctatttcaacagcgatgtttggacagccagaagtgtatttaactataaaagacattataccaaagttgtctagagcaaaattatatacaattgcgacatctggtatgagtgctgttagtatggcaatgttgggttcatatatgcaaatgattgaacctaagttcgtagttacagcagtaatgttaaatatttttagtgcgcttatcatcgccagtgtaatcaatccctataaatctgatgatactgatgttgaaattgataacttaacgaaatccacagaaactaaaacattgaatggaaaaacaggaaagcctaagaaagttgcctttttccaaatgattggtgatagtgcgatggatgggtttaaaatcgctgttgtagtagccgtaatgttgttagcatttatttcattaatggaagcaattaatatcatgtttggtagtgttggtttgaactttaaacagcttattggctatgtgtttgcaccaatcgcattcttaatggggattccatggagtgaagctgttccagctggctctttaatggctacaaaattaattaccaatgagtttgtagcaatgctagattttaaaaatgttttgggtgatgtatcagctagaacacaaggtattatctcagtttacttagtgagttttgctaatttcggtactgttggtatcatcgttggttcaattaaaggcattagtgataagcaaggagaaaaagttgcatcctttgcaatgaggttgctacttggttcaactctagcttcaatcatttcaggatcaattattggcttagtattgtaaattaatcgaagtatctaaattaaattcatggcaaagctaaaccccatcaccaagttggcgcaacagcgcatcataacttagtgacggggttttatcataacaatctactttttcgtagccgtttttgaaatgtatgttgatggtttatctttttcaaaaattgttaatcccgttatatcttttttatgttttgaagggacaatgaagctaagtatataagcaaagacaaaagcaactgtaaatgaaatggtagatacatagaaaggtgagttacctttgccaacaccattatagacataagcaaagatgatacccaatattaatccacaaataacaccgaatgtattcgtacgtttagtgaaaataccaactgcaaatacaccagctaatggaacaccgaataatccagttacaaacaagaataaatcccataagtcatttgaattagaagcaattaagtatagtgacattccaaaaccgaaaatacctgcaatgatgatgaccaaacgagcaaagttaacttcgtgtcgctcgctaccttttccgaagaaacgttgcttaatgtcgattgaaatacaagcagatatagaatttaaactagatgaaatggtagactgtgcagcggcgaaaatggctgcaataagtaatcctgcaacaaatggtggcatctcagtcaaaatgaaatatggcactacagatgatgtattgaagccttttggtaaaacagcttcatgtgtataaaatgaatacagcattgtacccataccataaaataagggtgctgaaattaaagctaggataccatttgtccataacgatttatttgtttcttttaaactatcagaagcttgataacgctgcacgacgtcttgactcgctgtgtattgatacaagttgttgaaaatatttcctaggaaaataattggaatggcagctgccgcagtgtttagtttccaattgtctgcactaattaattttttgtgctcaatcgcatctgcaaagacagtgccaaaaccgcctttaatgttcataatacctagaataatgataactaaagcgccgcctaataaaatgacgccttgaatgaaatcactccaaaccacaccttcgaaaccacctaaaaatgtatataaaatacatagtaaaccaacgagtgatgcaacgatataagggttcatgtctgatacagatgtgattgctaatgttggtaagtagataacaattgcaacacgccctaaatggtaaacgacaaataataatgagccaatgacacgtatgctagggccaaatctagcttctaaatattcatatgcagatgttacctttaactttttaaagaaagggacatagaaataaataagtaatggaataattgcgacgatagcaatgttaccagcgatatatgaccaatctgttaaaaatgctttctctggtgtcgacataaatgtaatcgcacttaacgtagtagcataaattgaaaagccaactacccaagatggcaagcgaccacttgcggtaaagaaactattggtactttggctcgcgcgcttggtaaaataaacgccaatgaacaacatagctagtagataaatgataacggcaacccagtttagtgtgccaaatccaacttctttcatgggcaacatcccctttacaatgtattgattctttgatgtctataaatcgtattttgcaatgagttgatctaatgtttgtcgatgtgcttcgttaaaaggtttgaaaggtcttttcggtaatcctgcatcaatgccacgatgacgtaatatttctttcaatgttggataaatccccattgataacactgtttcgataatgtcgtttgaatcatgttgcagttggtaagcttcttgaatttgaccttgtcgtgctaagtcgaagatttttcttgcacggcgaccattaacgttatatgtagaaccaattgcaccatctacgccagaaatcgtagcttgaactaacatttcatcaaagccagataagattaatttgtcggggaatgcttttctaatacgttcgagtaggaagaagtttggcgctgtatatttaacaccaacaattttttcatgattaaatagctcgctgaattgttcaatagaaatattcacacctgttaaatctggtattgcataaataatcatattgttctgagttgcttcgataatatcgaaatagtaatctctaatttcttcaaaagtaaatggatagtagaatggtgttacggcagaaagtgcatcataaccgagttctgtggcatattttccaagttcaatggcttcatttaaatctaacgaacctacttgagcaatcaatttcactttatccccaactgcctctttggcaaccttgaaaacttgcttcttctgctctgtatttaataaaaagttttcgcctgagctaccatttacataaagaccgtctaattcttcagtttcaatggcattttgagcaatttgtttaagtccttgttcatttacttgaccattttcatcaaaaggaacgagtaacgctgcatataaaccttttaaatctttgttcattatgaagtccctccaaaaatcatttgataatatagtttacagctataattgtaaacgctatcataaaatgtaacaatatctttttgaaaattgtagtcatatttatgtataattaatgaaaatgtttttcaaaatcaatagaaatggagtgagtaaggtgtattacatcgcaatcgatattggaggcactcaaattaaatcggcagttattgataagcaattgaatatgtttgactatcaacaaatatcaacgccggacaacaaaagtgagcttattactgacaaagtatatgagattgtaacaggatatatgaagcaatatcagttgatccaacctgtcataggtatttcatcagcaggcgttgttgatgaacaaaaaggcgaaattgtatacgcagggccaaccattccgaattataaaggtactaattttaagcgattattaaaatcactgtctccttatgtcaaagtaaaaaatgatgtaaacgctgcattactaggcgaattgaaattacatcaatatcaagcagaacggatcttttgtatgacgcttggtacaggcattgggggtgcgtacaagaataatcaaggtcatattgataatggtgagcttcataaggcaaatgaagttgggtatttattgtatcgtccaactgaaaatacaacgtttgagcaacgtgctgcaacgagtgcattgaaaaagcgcatgattgccggaggatttacgagaagcacacatgtgccagtattgtttgaagcagctgaagaaggtgatgatattgcaaaacaaatattgaatgagtgggcagaagatgtagcagaagggattgcccaaatacaggtcatgtatgatccagggcttatattaattgggggcggtatatctgaacaaggagataatctcattaaatatatcgagccgaaagttgcacactatttaccaaaagactatgtttatgcaccaatacaaacgactaagagtaaaaatgatgcagcattatatggctgtttgcaatgatagttgaaagaaggagtcattctaaaatagaatttgaaaccgttacgagagatgagagctgttgttagttccacacatcacactctatctaggaccaatctaaactatatcaaccaacagtgtgccacgggcaaattaaattgaagaagctgagatattaaaattttagaaaatgtaaaaaaatatttggtattgaaattaaaaaagcacctagcaactcgttgggacaatcacgatgattgtctacagttgcaggtggatttgaatatactactagttatttgttgtctaggataatagatttagtatgttgataagtttgactcagattcgtattttctaataaatgataactcacgatatcgattaaaaagagtgtcgcaatttgtgtgttgataaattgatggtcggtattacgcgattgatccgttgttaaaagtactaaatctgcacaatctgtaagtttactaccttcaaaatttgtgatggcaacgacatatgcaccatgagatttggcgacttccgctgcagaaattaattccgaagtattaccactatttgacatagcaataaacatatccgaatgagatagtagggatgccgatattttcattaaatgtgaatcggtagtaacattaccttttagccccatacgaatcatacgataataaaattcagtcgctgataaaccagagctacctagtccagcaaagagtatatgtcgacttgattgaagtttgtcgataaaggtttggataatgtcgttatcaataaattcaccagtttgttgaatgatttgttgatgatatttatgaattctttgaataattgggctattttcaataactgtctctgtcatttcttgttgaatattaaattttaaatcttggaaattctcataatccagcttatgactaaagcgtgtcatcgttgctggtgatgtaccaatcgcatgggctaaggagttaatcgttgaaaaggcatcgctataaccattttgtcttatataattgacgatgcgtttatcagtttttgtaaataaatgttgataacgttgaacacgattctcaaatttcattgtgtcaccccttcatcttaatgattactattatatatgaaaaatattttcaagatagtaaaaagcattgataaaaattatcttaatgatatattgtaaatgactttacgtgaaaaaatgacttatggagtgaggaataatgttaccacatggattaatagtatcttgtcaggcactaccagatgaaccattgcattcatcttttattatgtcgaaaatggcattagctgcgtatgaaggtggtgctgttggtattcgcgcaaatactaaggaagacattttagcaattaaagaaacggtagatttaccagttattggcattgtgaaacgtgactatgatcactcagatgttttcattactgcaacgtcaaaagaagttgatgaactgatagaaagccaatgtgaagtcattgcattggatgcaacgttacagcaacgtccgaaagaaacgttagacgaattagtatcatatattagaacacatgcaccgaacgttgaaatcatggctgatatcgcgaccgttgaagaagctaaaaatgccgcacgacttggctttgattatattggcacgacgttacatggctatactagttatacgcaaggacaattactttatcaaaatgacttccaatttttaaaagatgtactacaaagtgttgatgcaaaagttattgcggaaggtaatgtcattacaccggatatgtataaacgtgtgatggacttaggcgttcattgttcagtcgttggtggtgcgataacacgaccaaaagaaattacgaaacgttttgttcaaattatggaagattaaatgataacgataaaaaaacgagatgaccatcattaattaaaggcacctaattatcttaggtggctgaatgaatgtaatgggttcatctcgttttgtttgtttatgatagtgattttattttcaactttatccaaaaataagtaaagcgacggggatggtgattaatagcgacaacgccacgcgtaaaaaccaaatgatgatgagtttccagacaggtattttaatttcagttgctagtatacatggcactaatgctgagaaaaagataatggctgatacgcttactacaccgacgacaaatttagtactcattgcagctttagttactaacaaagatggtagaaacatttctacaatagaaatcgctgacgcttttgcaagtacagcctgatcagcaattgggaaaatataaataaatggatagaatatatagccaagccaatcaatgaatggtgtatagttcgctacaatcagtcctaaaaaaccaatcgataatatagaaggtaaaataccaacagtcatttctaaaccgtctttcaaattgtcccaaacgttcttcacgagagatggtgttaatgcattttgtttcatcgcctctgcatatgcagttttcagtctgcttccttcaatagcaacttcttgttctccttcttgtccgttataatattctgttgattcattggtgattggcggtagccatgcagtaattgcagtcacgacaaatgtgatgactaaagttatccaaaagtataaattccaatgcggcattaatcctaaagttttagcaacgataatcataaaagttgctgaaactgttgaaaagccagtcgcaataatcgtggcttcttgtttgttgtacatcccttgcttatagacacgattagtaatcaataatcctaaggaataactgccgacaaacgaagccactgcatcgacagcggattttcctggtgttttaaaaataggtctcataataggctccatataaacaccgacaaattctaataagccatagcccactaataaagaaagcgcaattgcacctactggaattaagatacttaatggcatcattaatttttcaaacaaaaacggaccatagttagctttaaatagtattgatggaccgattttaaatacatacattataccgatcattgcacctgcaactttaaataatgtaatgaccaagtttgtgattgaagtcataaaagtacgtctcactattggtaacgctgtaccaattaaaatcataatcagtgcaacatagggcataagtggacctatgattgagcgaatggctagatgaacatgatcgacgaaaatagtgttgttaccattaatcgtaaaaggaataaagaaacatagtatgcccactaaactatagacaaaaaaacgccatgcacttggttgttgtgcattagaatgatattgattcattaaagcaacccctttgtttaaatgaatacacaaaactgtatgatgcatcttccccttaatgagatgaatcattattttaatttagaaaaatctgaaaacttactataattgtatagtttgaattattttcataccaatacaaattaactaattatatatagattgaaactatattgcttaataaaatatttatcttaaatgttgttgtgttgattcaacgccacaactaaaagtgtttataaattatttggaaatgcacatatttgtaaatgattagtatcgatttaatatcgtattattaaatttttattaattttgtagtcttaatcaaaaaataatatatgtcatgttatattgaaggtgcagttgtttttcattctcaagagggggtcaaaaaaatacttttgaggtgattatatgttaagaggacaagaagaaagaaagtatagtattagaaagtattcaataggcgtggtgtcagtgttagcggctacaatgtttgttgtgtcatcacatgaagcacaagcctcggaaaaaacaccaacgtccaatgcagcggcacaaaaagaaacactaaatcaaccgggagaacaagggaatgcgataacgtcacatcaaatgcagtcaggaaagcaattagacgatatgcataaagagaatggtaaaagtggaacagtgacagaaggtaaagacacgcttcaatcatcgaagcatcaatcaacacaaaatagtaaaacaatcagaacgcaaaatgataatcaagtaaagcaagattctgaacgacaaggttctaaacattcacaccaaaataatgcgactaataatactgaacgtcaaaatgatcaggttcaaaatacccatcatgctgaacgtaatggatcacaatcgacaacgtcacaatcgaatgatgttgataaatcacaaccatccattccggcacaaaaggtattacccaatcatgataaagcagcaccaacttcaactacacccccgtctaatgataaaactgcacctaaatcaacaaaagcacaagatgcaaccacggaaaaacatccaaatcaacaagatacacatcaacccgcgcatcaaatcatagatgcaaagcaagatgatactgttcgccaaagtgaacagaaaccacaagttggcgatttaagtaaacatatcgatggtcaaaattccccagagaaaccgacagataaaaatactgataataaacaactaatcaaagatgcgcttcaagcgcctaaaacacgttcgactacaaatgcagcagcagatgctaaaaaggttcgaccacttaaagcgaatcaagtacaaccacttaacaaatatccagttgtttttgtacatggatttttaggattagtaggcgataatgcacctgctttatatccaaattattggggtggaaataaatttaaagttatcgaagaattgagaaagcaaggatataatgtacatcaagcaagtgtaagtgcatttggtagtaactatgatcgcgctgtagaactttattattacattaaaggtggtcgcgtagattatggcgcagcacatgcagctaaatacggacatgagcgctatggtaagacttataaaggaatcatgcctaattgggaacctggtaaaaaggtacatcttgtagggcatagtatgggtggtcaaacaattcgtttaatggaagagtttttaagaaatggtaacaaagaagaaattgcctatcataaagcgcatggtggagaaatatcaccattattcactggtggtcataacaatatggttgcatcaatcacaacattagcaacaccacataatggttcacaagcagctgataagtttggaaatacagaagctgttagaaaaatcatgttcgctttaaatcgatttatgggtaacaagtattcgaatatcgatttaggattaacgcaatggggctttaaacaattaccaaatgagagttacattgactatataaaacgcgttagtaaaagcaaaatttggacatcagacgacaatgctgcctatgatttaacgttagatggctctgcaaaattgaacaacatgacaagtatgaatcctaatattacgtatacgacttatacaggtgtatcatctcatactggtccattaggttatgaaaatcctgatttaggtacatttttcttaatggatacaacgagtagaattattggtcatgatgcaagagaagaatggcgtaaaaatgatggtgtcgtaccagtaatttcgtcattacatccgtccaatcaaccatttgttaatgttacgaatgatgaacctgccacacgcagaggtatctggcaagttaaaccaatcatacaaggatgggatcatgtcgattttattggtgtggatttcctagatttcaagcgtaaaggtgcagaacttgccaacttctatacaggtattataaatgacttgttgcgtgttgaagcaactgaaagtaaaggaacacaattgaaagcaagttaaattcatcttctgaatttaatatgctatgtaaatcgtgctactaacatggcacagcagatataagtagcatcacagtgttgaatttcaaaatagtaaagtgaaataaagcgcctgtctcattagcgaaaactaaagggacaggcgtatctgtttatgagcttaataaattgtatgaataatatggttgatcgaataactgtttatcatgatgataaattgagttttttaaaataatgatatattacaccattgttatagcgtttaagaaatcaacaactttacgataaatagtgattgcttcgtcattaggtctacgatcaaaatcatgctcgtttttattcacgcgttcaaatgttgaatgtggaacatgattcatgatatgttcgctttcctcaacgggaacatcataatcgctattacaatgcgcaatgaaaacaggtggaagtgttttaagttcatctggtgcaatattatattttgaatcagtataatcagcaatgttaatcatatttatccatttacctgtgccacgtgcataaacgtagattaaaaaacgttgtgcgatttgatcttgaacaaccggtgttggtgaagtgagttgtgcaatcattgtttcgtttacgctttgagctattttggcgtaataactattagttgttttaaaaggttcagtgttgatgcgactataaccataaaaatcaataacaccatcaatatctctgtctcgtgcaattaatagacttaaatatgcacctgatgatctgccaaaggtaaaaatagggcaattagaatattgtgattgaatcgcatcgaatgatgcgtagacatcctcaataatgcaatcgagacttacttctggtaataaacgataacttagttgaattaaatcgtaatgttccgtaaggatatcgatatactgtggggataaatcgttagctttaccgaacattaatccaccaccgtggatgtagacaatagcgccttttgttggttgattttttgctttaataattgtgtaaggtaatgcaaatgcatctttagtaattactttatctttaatttcagtcacgatttaataggctccttatttttgatattgatgtcattataacactgtcttaaatttccatgaaaaatagtcttaagacgatgagtcatgataattctgttccaattgacgtaaagcgtcacgggtatgcttctttagaccttccccataatccatcattttaacaatatctttaaaagcagcatgtggaatggctaaatcttctaaatctgccatagaaaattcaagattgatatcatgtggtcgctgttcagcaagtttatgcacaaagtcaggttctgtgacaaaaggcgaagacatgccgaccatatctgcatgttgtaaagcatctaaagcagactctggagaattaatcccgccacttgcaattaaagggatacgacctgctaaatgttcatagacaatttggttaactggtcgaccgaaatgatcacctggtgtacgagacgtattttgataaatatgtcgaccccagctagcgattgctaagtattggatgtttgaaacgtccatgacccaatcgattaattggttgaactcgtcaatggtatatcctaaatcactgcctctggtttcttctggcgttgctcgaaatcctaaaataaaattgtcaggtgcttctttatcaatcacttcttgtaccgcacgcataacttctaaacataatcttgcacgattttttaatgagtcggcaccgtaatggtctgtacgtttattcgaaaaagttgagaaaaatgtttgaatcagcaaacgttgtgcaatcgaaatttccacaccatcaaaacctgctttaatcgcgcgtaatgtagcatcgcgatactgctgaatgatgctattgattttctcatgagacatggcgataacatcgtgttcaatcggtgaatgcaatgtcatagggcttggtccatacacctttccaaaatttaaaatggcttgatttgaaaaacgaccagcatgcgctagctggataatagcgaggctaccatgttgtttcatcgtagatgccatgttagttaatccagggatacaagcatcatgatcaatgttgaacccatattcaaacaattgaccataaggttcaatgtaagcagcgccggtgacttgcataccagctgaattagagcgacgtgcagcataagccaagtctgcttttgtaatatagccttcttttgttgatgcgtttacggtcattggtgataatacaaagcgattcgaaattttgatgccattaggtaagtggattgattgtaaaagtggtttgtatcggtacatactatgattccttttctattcaatattgttttcaaagtaccatggaaagaatgaataatcaatgatgaacagtcttgatagaatagaattggtacatggaaaacatttttaaaattgaactaatgaatggcatttgtaggtctgaaaatatgaatatgaaaaagaaaaataaaggcgaaaagatataaaagttaattgaaaaacgttatcatatacgtgggtatatgaagagggaatggtattaagaacgctaaaatgttatgtcggtttgacatgacaggataagtttggagatgacggattggttaaattaagcgtattagactatgccttaatagatgaaggtaaggatgcacaaaaggcattgcaagattcagtgacacttgcaaaattagcagatcgacttggctttaagcgaatttggtttacggaacatcataatgtaccagcgtttgcatgtagtagtccagaacttttgatgatgcatacattggcgcagacaaatcacatacgagttggctctggtggtgtgatgttgccgcactatcgaccttataaaattgctgagcattttagaatgatggcagcgttatatccaaatcgtattgatttaggtattggcaataatccgggtactactatggtaaagcaagctttagatggaataaatcctacatatgatagttacgatgaatcgatttcgttattacgtgattatcttacaataaaggataaaccaagtgcgcatacgttaggtgtccaaccacacattgatcattttccagaaatgtggttattaagtagtagcgcaacatctgccaaaatagctgccgaactaggtatagggctttctgttggcacatttttgctaccagatataaatgcgatacatgcagcgaaggataacattgatatttacaaaaaacatttccaagcatcaacgattaaaatggacgcaaaggtgatggcatctgtatttgtcattgtagctgataatgaagcggaagtagcagcattgcaacatgccttagatgtttggttattaggtaaattacaatttgcagaatttgaacattttccatcggtagacacagcgcaaaagtataagcttaatgatcgagacaaagagatgattcaagcacatcaagcacgcatcattgcaggtacacaagaacaggttagagcacaattagatgatttcattgctacgtttgaagttgatgaggtgttagtagcaccgcttattccaggcattgaacagcgttgtaaaacattaaaattactcgcggaaatctatttgtagcattttaaatagaagagaaaggatgaagataagatgaaaaagttagctaattatttatgggtagaaaaagtaggagatttgtatgtgtttagtatgacacctgaattgcaagatgatattgggacagtaggttatgttgaattcgtaagtccagatgaagttaaagtggatgatgaaattgtgagtatcgaagcatcgaaaacggtcattgatgtgcaaacgccattgtcaggaacgattattgagcgaaatacaaaagcggaagaagaaccgacaattttaaactctgaaaaaccagaagaaaattggttgttcaaattggatgatgtcgataaagaagcattcctagcattaccggaggcttaaatggaaacgttaaaatcaaataaagcgagacttgaatatttaatcaatgatatgcgtcgagagagaaatgacaatgacgtattggtaatgccatcttcatttgaagatttgtgggaattatatcgaggcttagcaaatgtcagaccggcattacatgtaagtgatgaatatttagctgtacaagatgctatgttaagtgatttgaatcgtcaacatgttacggatttgaaggatttgaagccgataaaaggtgacaatatctttgtttggcaaggtgatatcacgacgttaaaaatcgatgctattgttaatgctgcaaatagtcgttttctaggatgtatgcaagctaatcatgactgcattgataatattattcatacaaaagcgggtgttcaagttcgacttgattgtgcagagatcattcgacaacaagggcgcaatgaaggtgtaggtaaagccaaaataacacgtggatataatttgccagcaaagtatataattcatacggttggtccgcaaatacgtcgattgcctgtttcaaagatgaatcaggacttgttagctaaatgttatcttagctgtcttaaattggctgatcaacatagtttaaatcatgtcgctttttgctgtatatctacaggtgtatttgcttttcctcaagatgaagcagcagaaattgctgttcgaacagtagaaagctatctcaaagaaacaaattcaacattgaaagtcgtgttcaatgtatttacagataaggatttacaactgtataaggaggcattgaaccgtgatgcagagtagtaaatggaatgcaatgtctcttttaatggatgaaaagacaaagcaggctgaagtattgcgtactgcgattgatgaagcagatgcgatagtgattggaattggtgcaggcatgtctgcatctgacggatttacatatgttggagagcgttttacggaaaatttcccagattttattgaaaaatatcgcttctttgatatgttgcaagcgagtttacatccttatggcagttggcaagaatattgggcatttgagagtcgttttattacattaaactatttagatcaacctgtaggtcagtcttacctcgctttaaaatccttagtggaaggtaaacagtaccacattataactacgaatgcagacaatgctttcgatgtagctgattatgatatgactcatgtatttcatatacaaggggagtatatactgcaacagtgtagtcagcattgtcatgctcaaacgtatcgcaatgatgatttaattcgtaaaatggttgttgcgcaacaagatatgcttataccttgggagatgattccaagatgttcaaaatgtgatgccccaatggaagtgaataaacgtaaagcggaagttggtatggttgaagatgctgaatttcatgcgcaactacatcgttataatgcttttctagagcaacatcaagatgataaagtgttgtatttggaaattggaattggttatactacaccacaatttgtgaagcatccttttcagcgtatgacacgtaaaaatgaaaatgccctttatatgacgatgaataaaaaggcatatcgcattccgaattcaattcaagaacgtaccatacatttaactgaggacatctcaacattgattacagcagcactccggaacgacagcacaacgaaaaataacaacattggagagacagaagatgtacttaatagaaccgattagaaatggagaatatattactgatggtgcgatcgcactcgctatgcaagtttatgttaaccagcatatctttttagatgaagatattttattcccttattattgtgatccaaaagtggaaattggacgttttcaaaatactgctatagaagtgaatcaagattatatagataaacacagtattcaagtagttcgccgagatactggtggtggcgctgtgtatgttgataaaggtgccgttaatatgtgttgtattttagaacaagacacttcaatttatggtgattttcaacgattttatcaaccagctataaaggcgttgcatacattaggtgcaacagatgtggtacaaagcggtagaaatgatttaacattgaatggtaaaaaagtgtcaggcgccgcaatgacattaatgaataatcgtatttatggcggttattcgctattacttgatgttaattatgaagcaatggataaagtgttaaagcctaatcgcaaaaagattgcatcgaaagggattaaatctgtgcgcgcacgtgttggtcatcttagagaagcactggatgaaaagtatcgtgatataaccattgaagaatttaaaaatttaatggtgacgcagattttgggaatcgatgacattaaagaggcgaaacgatatgaattaacggatgcagattgggaagcgattgatgaattagctgataaaaagtataaaaattgggattggaattatggcaagtcacccaaatatgaatacaatcgaagtgaaagattatcttcaggtacggtagacataacaatttctgttgaacaaaatcgtatcgcagattgtcgtatttatggggatttctttggacaaggtgatataaaagatgtggaagaagcattacaaggaacaaaaatgacaagagaagatttaatgcatcagttaaagcaattagacatcgtttattattttggtaatgttacggtagaatcattggttgagatgattttaagttaatattgtttaggcgttaatgtcacaccctcaatgaatatgtgtatttgcttttaaaatggtgactatgtagttatgtaatttgatcatacgattgaaaatgaatttagttaattagcaaagacatcatatttatagcgtttgtgtttattagtgattgggtatttgaaaatggttaatgatagtttttaaaggaataaattcattttcatttatataagtaagattaaatactagctactaaagtctatttatatacgtcaaaatataatgactgctataatgagtaatcaatagacacaaagaggagattatgtgatgaataataaagtattagtaaccggtggtacagggtttgttggcatgcgaattatttcacgattattagaacaaggttatgaggtacaaacaacgatacgtgatttaagtaaagctgataaagtaattaaaacaatgcaagacaatggcatttccacagagcgattaatgtttgtcgaagcggatttatcacaagatgaacattgggatgaagcaatgaaagattgtaaatatgtcttgagtgtagcatctccggtgtttttcggtaaaacagacgatgcagaagtgatggcgaagcctgccattgaaggcatacaacgtattttaagagctgcagaacatgctggcgtgaagcgtgtggtgatgactgcaaactttggtgcagttggttttagcaataaagataaaaattcaatcacaaatgaaagtcattggacaaatgaagatgaaccaggcttatcagtatatgaaaaatcaaaattgttagctgaaaaggcagcgtgggattttgttgagaatgaaaatacaacagtagaatttgccacaatcaatccagttgcaatttttgggccatcattagatgcacacgtttcaggaagctttcatttattagaaaatttattgaatggttcaatgaaacgtgtaccgcaaattccattgaatgttgttgatgtgagagacgtagctgaactacacattttggcaatgacaaatgaacaggctaatggcaagcgatttattgctacagctgatggacaaattaatttgttggaaattgcaaaattaattaaagaaaagagacctgaaatagctcaaaaagtttctactaaaaaattaccagactttgttttgagtctaggtgctaaatttaatcatcaagctaaagaaggtaaacttttattagatatgaatcgaaatgtaagtaacgaacgtgcaaaaatacttcttggttgggaaccgattgcgacacaaaaagaagcaattttagcagctgtcgatagtatggctaagtatcatttaatataatacaaaacaccgtccataagtaagtggctttcctcttgataaaagaggcattcactcaatatgtgacggtgttttatatatttacgttaacactattgctgtggcttttgacggccttttaataaaattgctgtcgcacctacgataataataaatagaatcgcaccaaataatcccatatattttactgcgttaccgaacacgataccgacagctaaaaagtctgtatctgagaatgttgttgcagcaccacctaattcgcctaaaaatggcaagaataataatggtaaaaacgtgattaggacaccatttagagcggcgccagcaacagcacctttaataccgcctcttgcattaccgaatacagcagccgttgcacctaagaagaagtgtgcaactacgccaggtaaaatgacgacgccaccaaataagaataagataaacataccgatgacacctgtaataaagctgacaaagaatccaattaatactgcattttgtgcataagggaacacaatagggcagtctaatgcaggtttagaatttggtacaagcttttcagaaattcctttaaatgctgggacgatttcagctaagattaaacgaacgcccgttaaaataataaatacaccagcagcaaatgtcacaccttgaattaatgaaaagacaataaagttttgaccatcactaatagattcgtgtacataactaacgcccgcaaataagcatgcgatgaagtaaagtaatgccatcgtaatcgagatactaattgtactttctcgtaagaaacttaagccttttggaaatttaatctcttccgttgatttagacttacctttgaataattgacctacagcacctgcggcaaagtaactgattgagccaaaatgacctaacgctacttggtcattccctgtaatttttcgcatcgtaggttggagtaatgcaggtaagactgccatgattaatcctaatacgagtgcgccgataataatcgttagccagcctttaatatgactgactgttaaaatgattgctaaaaacgcagccatgtaaaatgtatgatgacctgttaaaaagatatattttaaattagtgaagcgggcaattaaaatattaacaatcatgccacagaccatgatgagtgcagctgttgttccaaaatcttttaaggctagtgagacgatagcttcgttgttaggtacgataccttgcacaccaaatgcgtgttggaatattttgccgaatggttcaagagatcgaacgacgacatcagcacctgcacttaaaattaagaagctcaatatcgttttaatggttcctgaagtgatcgttgcggcaggttttttctgaacgattaaacctataaaggcaatcagtgcaacaagaatggctggttgacttaaaatatcgactataaaattaaggattgcttgcataggtggtacctcctttaaatcatgttaagttgttgtaatttttctgagagcttttgttgtaattcagctttgtctaaaatattatcaagaactaagacatcccctagacgttcggcattttcagctaaatctctaccacaaataaacaagtcagccatctctggacttgctgtcataatgtcactatgttcaacttcgatatcagatggtgcattaagttgcctaagtgcttcttgtgcgttcatttctaccataaaactacttcctaaaccgtggccacatactactaaaattttcatattaatcatgctcctttaaaatgtttttaatgtcttgtgcgtttgttgcagttaatagttgctggactgtttggttatcgcccagtatggttgctaaattttgtaatacagataagtgtgaatgattgtcgatggcactcaatacaaaaatgagtgatgcgtagtgattttcatcacagaatgccacatgttggttcaactttaatagacttaaaccaacttgatgtacgtcattgttcggtcttgcatgtgcaattgcaatttcaggtgcgataacgatataaggtccaagttcattaacgctatcaatcattgcttgaacatagccttgttcaataatttgttcttgtagtaatggctgagaagctatagttatagcttcagtccaatcatttacttgttcttttacaatgatgcgtgatgttgacaaaatgtctaatgacacgttattaagcctcctttgtcatagttaaagcaatgtgttgtttaattttaaaaatattcccatctaagaaatcttgtcgatataagtcgttgcttaagcattcgcttaactgtcccaatgcctttaaatgtgcattggggtggtccgttgctaatgtaattacaaggtgaacgggatcgttagctttactaccaaagatgatcccttcagtgaaataagttagtgcgaaacctacaccattctgtacataatcagtaccagcgtgaataagtgcaatatgtggactaatgaccatatatgacccgaattgttcaaattgttttaaaattgcagctgtataatttgaatcgacaatgccatcattgattaaaggttgcacagccactgtaattgccggttcaattgataatggttgtttatttataatgatgcgatgttcaggcaataaatctgcgagtgacttgccatcagttgccattttcatgactcgttgttctcttgagtcattgataatttgattcaatttttgacgagattgttgattgataaatggatcgacatgaataactggtacagctgatatttcacaaggtactgttgaaatgacataatcaatgttatcctgcaataatcgactttcttccaattgataaatggaataggcatcccaaatgtgaaactcaggatacaggtgatttagttttgattttaaaagttgcgacgtgcctataccagaaccacatagtaagacaaccttaatcattgattgtttatgtgttgcaacacgctctatacttgatgcgaagtgaattgtaatgtatgttaattcatcttcgttgaagcgaatagcagcatcttgttcaattgggctaatatgcttgctaacggcttcaatgatttgaggatagcgacgcataacttcttgcctcaaaggattaggttgtagcatatcgtatttaatacgatgtatagctggtttgatatgtgtgatcagactggtatgtaacttgttatcttttgacatatcaatgcctaattcttggctaacacaagtaatcaattcatgtatattttgcgataaattatggtattcaaaggtaattgaatatgctgtatgttcagtcattttagagcctagtaaatgtaacgtgataaagataatttcagactctggaaatgtgacattacaactgcgttctaagttttctatcatttttgaagcaatagcatactgactagtatgtcgccatttatcaatttcattgataggtatatcgaacgaaaaattttcatttaaacgctgaatggcaatgagtatatgatagattaagccatcgatagccgactgaactaaatgataattttcactatttaatgtcttaataatggcacggcgaaccaatgcgattgattctgaattaaagatatccgcctctataaaaggtgcagcttgtttcatatattgatgtataaagtgtgcatacgctttacgataatgatcttcctcaccaataatattgaatcctttattgtggacataatttaactttaaatggtattgatctagttgggcttgaatcattttaatatcatctgcaattgtccgacgcgaaacattaacatcttgcgcaagttgctttgttgaaacaggatcggttgtttcgaataactttaaagcgatatgtgtgagtcgttcatcttttgaaaaatgaatttgatttgttagattgtgctctaattcatttaatagtgtcgcgtgagctgttgttactttgatgcctgcagctttattacggctgacttggtaatgataagtttcagcatattgctcaatatatgctatatcatattgaatggtacgaggtgatacaccaagttgattagcaatggtattgattggaataaacgtttgctcatgaattaaaagatacaaaatttcgatttgtctataacttaacaacgtaatatcctcctatttgtaattgtaagcgatttcttaaaaacgtagatatgcaatctctttcatattttaatccgaaaaattgcatatcaaaatgtttatggcgcaagattttataggaacttttaaaataaattagatattcatgttgacaatttaaaaatgtcgcagtatatttagttagacatctaacgaaatggtggtgcaataaatggaattcacttattcgtatttatttagaatgattagtcatgagatgaaacaaaaggctgatcaaaagttagagcaatttgatattacaaatgagcaaggtcatacgttaggttatctttatgcacatcaacaagatggactgacacaaaatgatattgctaaagcattacaacgaacaggtccaactgtcagtaatttattaaggaaccttgaacgtaaaaagctgatctatcgctatgtcgatgcacaagatacgagaagaaagaatataggactgactacctctgggattaaacttgtagaagcattcacttcgatatttgatgaaatggagcaaacactcgtatcgcagttatctgaagaagaaaatgaacaaatgaaagcaaacttaactaaaatgttatctagtttacaataaatgataagtgtgactggtagaaatcagtcactttatctttaatactatagttagatatctaattgttagtaagctaattattggaaaagacaaggagtattgaacaatgaaagacgaacagttatattattttgagaaatcgccagtatttaaagcgatgatgcatttctcattgccaatgatgatagggactttattaagcgttatttatggtatattaaatatttactttataggatttttagaagatagccacatgatttctgctatctctctaacactgccagtatttgctatcttaatggggttgggtaatttatttggcgttggtgcaggaacttatatttcacgtttattaggtgcgaaagactatagtaagagtaaatttgtaagtagtttctctatttatggtggtattgcactaggacttatcgtgattttagttactttaccattcagtgatcaaatcgcagcaattttaggagcgagaggtgaaacgttagctttaacaagtaattatttgaaagtaatgtttttaagtgcaccttttgtaattttgttcttcatattagaacaatttgcacgtgcaattggggcaccaatgatttctatgattggtatgttagctagtgtaggcttaaatattattttagatccaattttaatttttggttttgatttaaacgttgttggtgcagctttgggtactgcaatcagtaatgttgctgctgctctgttctttatcatttattttatgaaaaatagtgacgttgtgtcagttaatattaaacttgcgaaacctaataaagaaatgctttctgaaatctttaaaatcggtattcctgcatttttaatgagtatcttaatgggattcacaggattagttttaaatttatttttagcacattatggaaacttcgcgattgcaagttatggtatctcatttagacttgtgcaatttccagaacttattatcatgggattatgtgaaggtgttgtaccactaattgcatataactttatggcaaataaaggtcgtatgaaagacgttatcaaagcagttatcatgtctatcggtgttatctttattgtatgtatgattgctgtatttacaattggacatcatatggtcggactatttactactgatcaagacatcgttgagatggcgatatttattttgaaagtaacaatgacatcattgttattaaatggtataggtttcttgtttactggtatgcttcaagcgactgggcaaggtcgtggtgctacaattatggccattttacaaggtgcgattatcattccagtattatttattatgaatgctttgtttggactaacaggtgtcatttggtcattattaattgctgagtcactttgtgctttagcagcaatgttaatcgtttatttattacgtgatcgtttgacagttgatacatctgaattaatagaaggttaaatatttcgtacacttctggctgagtatatttcggtcggaagggtatttttcgaaaaaaataaatatatgatacgattatgaaaaaataaagtgagattggcatatgtacaaatctaaaatactgttgaaatatatttttagtgaagaatcagaagttaaagatttaactgaagaaaaatataatcaagattacgaagcattaacatttagctttaaagaggaaacatatcaaagtaggttagctaagaaaacaccgactaaagcagggtattttgttacatgttggacgaaagacgaagataattataatcggccatacaaaattgaagagtttgctgattacctgattgttgctgttatcgatgatgaattaaatggctactttctatttcctagggaattattggtagaaaaaggtatcttaactacatttgaacataaaggtaagatggcttttagagtttatcctaagtggtgtaatcaattgaataaaacagcagggcaaacacaaaagtggcaatgtaaatatttttttgaatactaataaaaagtcatatggttgaacttataagagatgaatatatcatctttcgataagataaccctatgactttattttttatcatttaatgatgaacggtttcttgtcctactttattccaagtgaggataaagctcaacattgcaaacacactgattgctgttaataaaataaaaccgacatcccatccgaatttatcaactacagcacctaagacgatgttggccattacagcaccaaacagataaccaaataatcctgttaatccagctgctgtgccagctgcttttttaggtacataatctaatgcttgtaaaccaattaacataactggtccatatattaagaaaccaatggcaattaatgagacattgtctaaccaagcattgcctggaggatttaaccaataaattaatacaaatactgtgacacctaacataaagaagaaacctgcaggtcctcgacgacctttgaataatttatcagaaatgtaaccacataataatgtaccaggaattccagcccattcgtataagaagtatgcccaacctgatgcttttaagtcgaaatgtttttcttcacttaagtagactggcgcccaatcaagtacaccataacgcacgaaataaacaaatatatttgcaaaggcaattgcccatacccatttattgtttagtacatatttaaataaaatttcttttgtagttaattctgtttctaatgttttcttatcgcttgtagcaaagtcatttttataaatttcgattggaggtaaaccttgagattgaggtgtgtctctaatcaatacgtatgaaattgctgcaatgataagtgctaagagtgcagggtaaatgaatacaccttcgaaaccttttaaataaccaaagttgataaatgctgttgttgtaataccccaagcagcaataggtgccataatacctccaccaacattatgcgcaacgttccaaagggcagtcttacttccgcgttcacttacactaaaccagtgaacgagaacacggcctgaaggtggccagcccataccttgaaaccatccatttaagaataataggacaaacataataccgatacctgatgtaaagaacggtacaaatcccattaacaaattgacgatagcagtgagtgctaatccaagaactaagaatatccgagcattgctccgatcacttacagtacccataaagaacttactaaatccatatgcgatggaaacagcagaaagtgcaaaacctagttccgcttttgtaaaaccttgctcttgcaatgccggcatcgctaacgaaaagtttttacgtaataaatagtacccagcgtaaccgatgaaaataccaagaaatacttggagacgtaatcgtttataggtatcatctatctgattttctggcaaaggcttaatatgctttgcaggtttaagaaaattcataaaatcctccttaatatgtatttatatgcattttgtgcgataaacttatattagacatgtatgaaagcgttgtcaatatacttttgtgaaatcttgcatatttagttattgaagtattttataaacatttagaaaaaataaattgctacacataaatttataattatgcaattattatgtcgttatacatactagctgtgtatctacgaatgagtacaaacatatttttatttgcagaaaaggggtaaatggcatataactatcttttttatgtaatctggtataaaatttatactaataggagggatagtatgaatatagtagggcatcatcacatatccatgtatacaaaagatgcaaaacgtaataaggatttttacacaaatgtccttggattacgattagttgaaaagtcggttaatcaagacaatccttcaatgtatcatttgttttatgtggacgaagtaggtacagccggaacaattttaagcttttttgaaattcccaatgcgggtcataagcagccaggcactgaaacgatttatcgattttctttattagtaccaaatcaagcggcacttcattattttgaaaaacgccttgataataatggtattacgtctgaacgtttgtactatcttggacaagaaggtgttgtctttaaagatgaagacgacttagaaatcatattgcttgttaatgatagttttgaagtaccacatcaatggcaacataacgtttatagtgaaatacctcaagcatatcaaattttaggaatagggccagtcgaattaagagttagaaatgcagcgcgtacggtagaatttttggaaaatgtcttaggttatcgcaaaagagataataaatcattcgatgtgctgacattagcaccacaaggtttatattcggattttgtagttattgagcaacagggacaacgtgaaagacctggacgaggttatatccatcatattgcagttaatacaccactaatgagtgatttagatgcaatttacaagaaattacaacaacaaccacaaagtaattcaggtataattgatcgctatttctttaaatcattatactatcgccataattcaattatgtatgaatttgcgactgaagcgcctggatttactattgatacacctgttgaacaattaggaagtcaattgaacttgcctgactttttagaagcagaacgtgaacaaattgaaagtaagttacacgaaatataaaggagaatgtttaatggccaaattagaaatgaataaaaatacgcctcttgagtttggtttgtattccttaggtgatcatttattgaatccattgaaaggtgaaaaagttagttatgagcaacgtattaatgaaattattgaagcaagtaaattagcagatgaagcaggtattgatgtttttgcagttggtgaaagtcatcaggagcattttacaacacaggcacatacggttgtgttaggtgcaattgcccaagcgacaaagcatattaaagtttcaagttcttcaacgattattagtgcaacagatcctgtaagagcatttgaagacttcgcaacattagatttgatttctcatggtagagccgaaattgtggctggtagagcatcaagaacaggtatttttgacttgtttggctatgatttaaaagactatgatgaattgtttgaagaaaaattaggtttacttttagagttaaataaaactgagcgtattacttggtctggaaaatatcgtccagaacttagaaatatgaaaatattcccaagaccaatcgataatacattgccaatatggcgtgctgttggtggtccacctgcaagtgctatcaaagcgggaaaacaaggtgtgccaatgatgattacaacccttggtggcccagcaatgaactttaaaggttctatagatgcttatcgtcaagcagcaactgaagcaggtttcgatgtttcgtctaagtctttaccagtaagtacagcgagtctgttttatacagctgaaacaactcaggatgctatgagagaattttatccacatttgaatacagggatgtcatttattcgtggcgttggttatccaaaacagcaatttgctaattcgtcagattatcgagaagcgctaatggttggaagtccgcaacaaattattgaaaagatattgtatcaacacgagttgtatggtcatcaacgttttatggcacagcttgattttggcggtgtgccatttgaaaatgttatgaagaatattgagttaattggcaacgaaattataccggcgattaaaaagcatttatcaaaataggaggggcgtcatcatgaatattgtattattgtcaggttccacagtaggttctaaaacgagaattgctatggatgatttaaaaaatgaactagaagtcatcaatgagggacatcaaatagagttgatggatttacgagaacttgaattagaatttagcgttggaaagaattatctagatactacaggagatgtatataaattaacgacgtcgttaatgcaggctgatgtgatttttattggttttccaatttttcaagcttccatccctggtgctttgaaaaatgtatttgatttgcttccggtcaatgcgtttcgtgacaaggtaataggacttgtagcgacagcaggttctagtaaacattatttaattcctgaaatgcatttaaaaccaatattgagttacatgaaagcacatacgatgcaaacgtatgtatttattgaagagaaagatttttcaaatcaacaaattgtcaatgatgatgttgtatttcgtttaaaagcgttggcacaatccacaatgcgaactgccaaagtacaacaacaagtgtttgaagaagaaaacaaccaatacgacttttaaagtataaaaataagacgctcggcacactaaatttgtaagtgtttgagcgtcttttcatattaactatatagccaatgaacgacaataaaggcaagtgatgacaagcatattgaggtaataatgattgtcataagcggtttaagtgcgcgatttttaagatctttaaatgccacatttaaccctaaagcaaccatggccattaataagcaaattgttgatacagtatttaaaatatttagcaatgctgacggaatagttacatatgtattcactaatgccataatgacaaatccaattaaaaagtatggaatgcttattcgacctttgctagatgattctgatgaacggaaacgcataattaaaataagtacgatggttaatggaatcagtaagaatactctgccaagtttgcccagcagtgcaattttaagtgcatcactaccaccaaagccgccagctaagacaacatgcgcaatttcatgaagactaacgccggaccaagcgccatagacagttgtcgtcattgaaaagatagcatagatagctgtatatataagtgaaaatatcgtaccaatcaatgcgatgataccgatactaatagctgtatccttttcacgtgatttgaatattggagctactgcagcaatagcggcagcaccacaaacgcctgtacctacacctagtaataatgcgatgtttttgtcaccatgtaacagtttgttgacaaagagcatcattacaatactaaaaataacgacacctacatcgatggctaatagtctactaccttgaccgataatatcgaatatattgagtttaagtccatataggatgattgcaaatcttaataaatatttagatgaaaacgtaatacctgagctatattgctcaggatatcctctaaagtgacgatatagaatagcgattaatatcgcgatagttaatgcgccaaccttatctaagattggcaatttagctgctaaaaagctaaataatgcgactataaatgttaatgatagtccaatcataaaatgcttgtttttcaatgatgccatgagcagtgcctcctttaatagcattttagcactgttttgtcgtatttttaaatataaatttggaatgaataataaagtagtgattaaattaagttgtgtgataggtatcaaggacatcaaccaaagtaataggcactacaacgcttattggcggggtcccaacaaagaagctgacgaaaagtcagcttacaataatgtgcaagttggggatgggccccaacatagagaaattgggtccgtaatttctacagacaatgcaagttggcggggccccaacatagagaatttcgaaaagaaattctacaagcaatgcaagttggcggggccccaacatagagaatttcgaaaagaaattctacaagcaatgcaagttggggaaggacaacaaatttaagatacaaggcgtaatattaatatgttattattatgataatttacagaattatatgaaaaatgaatgaggatgtgatggtatgtttggaatgaaagtgaatgaacaaataacattaaaaattttagaagctcatgacacagaagcgcttttcaatttagtcaatcgttcaagaaattcacttagggaatggttaccttgggtagatgcaactgagcaaccatcagatacgcgtgcatttattaaaagaggacttttgcaatttgctgatggtaatggatttcagtgtggcatttggtatgaaggaacgttagttggtgtcatcggtttacatgaaattaatcacatgcacagaaaaacttcattaggatattatttagataaacaatttgagtgtcatgggattatgacacaagcagttgaggcattgataaagtattgtttcgaagagcttgacttaaaccgaattgagattagtgccgcagttaataatgaaaaaagccgagctattcctgaaaggctgggatttactagagaaggtatgttacgtgacaatgaattactaaatggtatttattcatcgagttacatctatagtttattaaaatcagaatacgaccaaaaatgacaaattagacttacaaaagagtgatgacatttaaaatggcatcgctcttttatttaattttcgaaaataaaaggttgttgacagcattattttataacaatataatgattttgataattattatcaactagatgatgtttatgggaggatgctttaaaacagccgttttaagtgtaatgtattattttagcgtgtagggaatgcgaaaataatatttataagaacacatctatggggataatagaatttctataatgaggtgtcaaaatgaaaaagttaacaacgctattattagcatcaacgttattaattgctgcatgtgggaacgacgatagtaagaaggatgattcaaagacatcgaaaaaagatgatggtgttaaagcagaattaaaacaagcaacaaaagcatatgataaatatactgatgaacagttaaatgaatttttaaaaggtacagaaaaatttgttaaagcgattgaaaataatgatatggcccaagcaaaagcgttatatccaaaagttcgtatgtattatgaacgctctgaaccagttgcagaagcatttggagatttagatcctaaaattgatgcacgtcttgcagatatgaaagaagagaaaaaagaaaaagaatggtcaggatatcataagattgaaaaagcattatacgaagataagaaaattgatgatgtgactaaaaaagatgcacaacaattattgaaagatgcaaaagaattgcatgccaaagctgatacattagatatcacaccaaaattaatgttacaaggttctgttgacctattaaatgaagttgcaacttctaaaatcacaggtgaagaagaaatttattcacatacagatttatatgattttaaagcgaacgttgaaggtgcacaaaaaatttatgacttatttaaacctattttagagaaaaaagataaaaaattaagtgatgatattcaaatgaacttcgataaagtgaatcaattattggataaatataaagataacaacggcggttatgagtcatttgaaaaagtatctaagaaagaccgtaaagcatttgcggatgctgttaatgcattaggagagccactaagtaaaatggctgtgattactgaatgacaaattatgaacaagttaacgatagtacgcaattttcaagacgtacatttttgaaaatgttaggtattggcggtgccggtgttgcaattggcgcaagtggtgttggtagcatgtggtctttcaaatcaatgttcaatacaccagaagatccggaaaaagatgcgtatgaattttatggtaaagtgcaaccaggcattaccacacccacgcaaaaaacatgcaatttcgttgcgttagatttgaagtcaaaagatagagatgcaattaaggcaatgtttaaaaagtggacggttatggctgatcgtatgatggatggtgatacagttggcaagacgagtaacaatcctttaatgccaccagtagataccggtgaatcgataggattaggtgcaagcaagttaacgattacctttgggattagtaagtctttgatgaagaaaattgggttatctagtaaaattcccgatgcctttaaagatttaccgcattttccgaatgatcagttaatagacgattacagcgatggtgatattatgattcaagcatgctcaaatgattcgcaagtatcctttcatgcggttcataatttagttcgtccatttcgagatattgttaaggtacgttgggcgcaatctggttttatctctgctaaaggtaaggaaacacctagaaatttaatggcatttaaagatggaacaattaatcctagaaagagtaatcaacttaaagattatgtgtttattgatgacggatgggcgaaacatggaacttattgtgttgtcagacgtattcaaatacacattgaaacgtgggatcgtactgcactggaagaacaagaggctacatttggtcggaaacgacatagtggtgcgccgttaacaggcgggaaagagtttgatgaaattgacttaaaagcgaaagatagtcatggcgagtatattattgataaagatgcccatacgagactagcgaaagaagcaaatacgtcaattttacgtagagcctttaattatgttgatggcacggatgaccgcacaggtaactacgaaacaggcttgttgttcattgcttttcaaaaagcgacaaaacaatttatcgatatacaaaataatttaggtagtaatgataaattaaatgaatatattacacatagaggttctgcttcatttttagtattaccaggtgttagtaagggaggataccttggtgaaacattatttgactaaatttgtagcaatgctaataactgctgctatggtgtgtagctttgggttactgaaaagtcaggcagcagaacaacaaagtattagtgatgtatatagtgtgataacggatgcgaaatctgcactttctaataattcgatatcgaatgacaataagcagaaagcaattgagcaagtggtaagtgcagttaagaaattatcgcttgaagataatagtgaaggtaatgctgtcaaatcagatgtgagaaagcttgaagatgcaaaagcgaatgataatcaaaaagatacactttcgcaattaacgaagtcattaattgcttatgaagagaaattggctagtaaagatgcgggttctaaaattaaactattgcaacagcaagtcgatgccaaagatgctgcgatgacaaaagcgattaaagataaaaataaagcggaattagaatctttgaacaatagtttgaatcagatttggacaagtaatgaaacagtgattcgcaattatgacgcaaatcaatatggacaaattgaagtcgcattattacaacttagaattgcaattcataagtcaccattagatacggcaaaagtgtcacatgcttggacaacttttaaatcaaatattgatcatgtcgataaaaaaagtgatacgtctgcaaatgatcaataccatgtatcacaattaaatgatgcgttagagaaggcgattaaagctatcgacgacaatcaattgtcggatgctgatgctgcgcttacacattttatagaaatttggccgtatgttgaaggtcaaattcaaactaaagacggggctttgtatacgaaaattgaagataaaataccatattatcaaagtgtattagacgaacataataaatcgcatgtcaaagatggtttagtagatataaacaatcaaattaaagaggttgttggccatagttatagctttgtcgatgtgatgattatctttttacgtgaaggactagaagtgttattaattgtaatgacattgactaccatgacgcgtaaagtcaaagataataaggggactgcaagtgtgattggtggtgcaattgccggacttgtactgagtattatcttagcaattacgtttgtagaaactttagggaatagtggcattcttcgtgaaagtatggaagcgggattaggtatcgttgcggtcatattaatgtttatcgttggtgtttggatgcacaaacgttcaaatgcgaaacgctggaatgatatgattaaaaatatgtatgccaatgcgattagtaatggtaatttggtattgttagcgacgattggtttaatatctgtgttgcgtgaaggtgttgaggttatcattttctatatggggatgataggtgagctagcgacaaaagattttattattggtattgccttggccatagtgatattaattgtctttgcggtattatttagatttatcgtcagattgatacctatattctatatatttagagtattgtcgatctttatttttattatgggattcaaaatgcttggcgtaagtattcaaaagttacaattattaggtgcgatgccaagacatgttattgaaggattcccaacgattaactggttgggcttctatccaagttatgaaccattgatagcacaagctgcttatattatggtagttgctatcttaatctttaaatttaaaaaataaaaaacaggccgagtgcctgtttttttgttgcgatgttggaaatattcggtattgcagtataacgataatcacagcattaattcttataaggttaatgtgttggcggtttgcctcggcatgtgaacttaacaatgaacatactgaactcaaagagcaatatgagtggcaatgtgagtaatatatttaatgttaaatcgggtggtgcaatgatacttgctaatacaaagcaagcgaaataaatatattttcgataatgcttcaatgatgtggtatctataagaccgaattttgcaagtcctatgaataatattggcaattggaataaaatgccaaaagtgaaaagccaacggataagttcaactaaatacgctttaaagccaatgacaggcgaaatgtttaaagttaatgataattttaacgcgaattgaatgatcattggaaagctaacataaaatgcaaaagcgacgccagcacagaataataacacgctgaaaaaactatatttataaataaattgacgttcattattatgtaatccaggtgcaatgaatgcccacaattgataaaacatgactggtgaaatggaacaaaacgcgatgaaaaatataatcatcacgtatatttggatcatttctgtgaatgaaaatgcatgtaaggacacatgtgcacgggtaatatacgttatgaatggtgtcatccaccaaaatgatgaaacatatacgacgatgaccgtaatgacgaacgacaataaaatttttactaaccgatggcgtagttcgctaaagtgaaccattaatgtatcatcagtactattgctctcgttgttgcttcgattctttactgggtgtgtcgtgagactctttgtctaaatcttctgttgcagatttaaattcttttaaagtagaaccgatagcacgaccaaattgtggtaattttttcggaccaaaaataattaaagcgataatgctaatgacgacaagacttgttgggcctgtgatgcctaaaataaaagtgttagttatcatgataatcaacctcactcataagtagtatatagtatttactttataccgaacgataatgattatcaataaaattttatgaaataattaaaatattgctataaatacaaattactgaggtattaattctgaaataacagcttggtcttgcaagtcgatataagtacaagtgcccgcttgaatatcgatatgccatttataaatgccagcttcagccatttcatcacaaaatgtttcaaaatctgtttgcccttgttgatgtcttgttaagacgtcttgaactattgttttgtttgatttttgagcaacaggaatcgtacttttcacagatgacgtaacgatatcatcttctgattgatgtacgtatgttgcagtgccatcttgaatgttgacgatattgtaagtcatccccatatctttaaaagctttgaatagttttggaaagtcaacaccagtaaattgttgatgtgcttgttgaattgcagataatgtaaatgccataataatctcctttgaatggtttgatttagtgaaaatgcgtgcatcatactaaaattagaatgctgttaattatgcaggaaggtgtaacgaaagtaaacaattatgacttgtaggcgttgaggtgttgtttcaaaatgtcatacataggtgtacaatcatatttttttgtgtagatttgacaaatatagttgtcaaaaagacgcatatcatttacagtgtaattaaggagttgatgcgatgtgcgtaatcgattgaaagaattacgagcacgagatggcttaaaccaaacgcaacttgctaaacaagcgggcgtttcaagacaaaccatatcgctaattgagcgaaacaattttatgccatcagtattaacggcaataaaaattgctcgcattttcaatgaaacggtggaaactgtttttattattgaggaggatgaggcatgaaaatactaagatatatcggatatcttttactgggtggacttgtagggggtatcataggtggaattttaggtaattttgatggatttggtattgagaacttgacgtttgcgacatataacaatgtcgttgtaatatcgattgttgcgacgattattatcatattggtagaagccattgttttgatgaatcaaagacgtgcattgaagtataagcaacttgtagataaagaggtagatatcgatgcaacagatcaatatgagttgcttgcgaatcgttatgttttaaatggaagtatattaagtattctgcagacagttattgcttttttagtattgcttatttttgtggtagggcacgctgcagcaaatgcaatactattctttttaataccattttttgctagtgctattttcaatacacaatttacactgtttaatagaaggtttgatgacagaataccaaaaattgcagataagaattacactgaaaagcgattggaaatattggatgaaggtgaacgccatatagaattaattgcattatttaaaacatatgcgatcaacttatcaatattgatactagccattgtagtaattgggctttattcaattactactggaattaatcaaagctttagtttgctacttatcattgctattttcatatataacgcctttagttatttattgaagagaagacgtttttattaaaattaaacaaagaggagcatggatatgacaacattgttaaacgtagatagtgtgaacaaacaatacaaagattcggattttaaattgcaagatgcatctttaacgatttctactaatgagacagttggattaattgggaaaaatggctcaggtaaatcgacattaattaatattctagtaggcaatcgacataaagataacggtagtatcacattttttggagaagaacataccgtggatgatgtcgaatataaagaacacataggtgtagtgtttgatgatttgagagtgcctaataaattgactattaaagatattgataaagtatttcaatctatttatatgacttggaatagtcaaaaattctttgatttaatcaaatatttcgagttaccactacaaactaaaattaaaactttttcaagagggatgcgaatgaagatagctttaacgattgcgctttctcatgatgtgaagttattaatcttagatgaagcaactgcaggtatggatgtttctggaagagaagaagtaatggaaatactagaagattttgtcgcacaaggtggaggcatcttaatatcatcgcatatttctgaagatatagaacatttagctgataaattagtgtttatgaaagatggacgaatgattttaactgaacagaaagatatacttttagcacaatatggaattgttacgacagaagataaagatgttgaaattcctaagcatttaatcattgcttctagattgtcaaaggggaaatatcaaattttagttaaagattatgcagaaattgaaaatgcagagcctttaaaacacattgatgacgctacaaaaatcataatgcgaggtgaagtataatgaaaggtatgttcctaagtagtttttatgcaacgagaaagcaaacatatatttattttatagtcgctattatagctgcaggatactttgcagtatttaatccgttgatgagttcggcaatggctggggttatgttaatcacacctattactgataatattaaacatgaaaaagactcaagatggatgtattatgtatctactttaccggttaaacgtagtgattatattaagtcatactttgccttttatttaatcttattcggtgcaagtttaatgattggattagttgtgactacgattgtgacccaaagtgtgatgattggtattatgtcaggtttaatgagttttggtatcataggggcatactctatcattttcccattgacatttaaatttggcgctgaaaactccaatgtcattatgatatgtgcatctatactactacttatttctttcgtggtctttttctttatatatggtatggttagtggtgcatctgcattagaatttgaaaaaattagcactgaaggatggctagttgtcatagcatatgcggtcattggtatagttataacgagcgtttcttatatattgtctattaaaatttttaacaaacaagaactataattgtcgattttggtgatgatagtatttgaaataatatttagagcaggtgataaatctttacgattatcatctgctctttttggtgttgtggaatgaaatgcggggtgataagttgaggtgacatctctatatcatatcatttgtttttagaagattaggttgtgtgggaattacatccttttatagtgaggattaacgtgtatatattattgagtatgttgctgaaatttatttgcgtgtatcaattgatgatggtatatgccaatgatttccttggaaatataaaaacctcgatcatgtagcataactgaatccaaaagtataatgtgaagttcgacacttttggattcagttcaaatactttgaccgaggtgaatactatttattcatttttattacgtagacgttgatttttaaaataaatcagcatgatgcagaaagtcgcaacggataccgagataatcattacttggtcatgccctttaaagataaggctgatgatatatgatactacaagtatgccaagtgaagaagaaatatattttgcgtttgtcagttcattatggaaataaggggtgattaaccataatccaatatagaatattaaaacactgatatacatcatattaatttcaaacaagtcatttagtttattgttattactaaaaacaattgcagcattaatcacacctaaagcgatattgattaatagatgcgtatacgataaacggaaaccgatagatgacaatttatgattaatgtaattttcagtaatgatccaatatacaccgaaaagactaattaaaatcataaattggaatatataaatgtaactaaaatgatcaatgctaaatgatgacgaagctaaaccaaccagtacctcgccaaagataataattgttagtaacgaaaaacgttctactaaatgcatcatattaacaggtgataatacaagatatttctgaaatggaataagtcctgtcgctgcaatgaatacgcctaaaaatccagggatgtaatggatactttgtggtagtactaatgatagaaatgataaaaatgaaatcacaaaggctacgctcgcaaaagcttgacatgtacgcttatcgccataatctaaccctgtacgtatatgtaataaatactgtaatccgatacttaaatacataattgccacgcataagaagaatgggaagaatgtcttttcaaagtccggatataggctgttagataggaagaccatgatgaacatattaaacatcataaacgagacgtctttgaatgtaacttgaccaaatcgatttgtaaaaaatgtttgatgagaccacattaaccataagaacaaactcatgacgatgtatttgaaaaataaatcagctgaaatggaaccattttgtgttgttaaaatcacatgtgcaattttttgaatggcatagacgaaaattaaatcaaagaacaactcatggaatcctgcacgcttttcagctaaatgttttggtgttaatgcattaaccataaaattttaactcctttaagatgtgtaattaatttactaagtatactatttattttttctagtgaataggggcagatttggcgatgaagtggaaggagaggtgactgcaaggtaattgcggaattaacaatcatcagcgatttaatatttgactggagacgtcatggtaataaaaaattgatgagaaattgatggtgaaaccagctgtgaatagcgatgcaatgatagatagaatttaattagagtcattacgcgaaatgattaatgataatttgtggtaaatcaaagcataattttgtactatagatgaggatgatagagcatatttaagagtgtgaaatgttaaagtgaaaccgtttacgtttccgattgcccaaacaaattacatcattgtataatatgatttgttaaatgcataacaagaatgaaaatgtaacatacgtagcaattggtttcataaattggatgttagtggcgtattggttcattagacgtattagtaataaaattgtatatatcataaggagatgaatatgacatgacgagagtcgtattagcagcagcatacaggacacctattggcgtttttggaggtgcgtttaaagacgtgccagcctatgatttaggtgcgactttaatagaacatattattaaagagacgggtttgaatccaagtgagattgatgaagttatcatcggtaacgtactacaagcaggacaaggacaaaatccagcacgaattgctgctatgaaaggtggcttgccagaaacagtacctgcatttacggtgaataaagtatgtggttctgggttaaagtcgattcaattagcatatcaatctattgtgactggtgaaaatgacatcgtgctagctggcggtatggagaatatgtctcaatcaccaatgcttgtcaacaacagtcgctttggttttaaaatgggacatcaatcaatggttgatagcatggtatatgatggtttaacagatgtatttaatcaatatcatatgggtattactgctgaaaatttagtagagcaatatggtatttcaagagaagaacaagatacatttgctgtaaactcacaacaaaaagcagtacgtgcacagcaaaatggtgaatttgatagtgaaatagttccagtatcgattcctcaacgtaaaggtgaaccaatcgtagtcactaaggatgaaggtgtacgtgaaaatgtatcagtcgaaaaattaagtcgattaagaccagctttcaaaaaagacggtacagttacagcaggtaatgcatcaggaatcaatgatggtgctgcgatgatgttagtcatgtcagaagacaaagctaaagaattaaatatcgaaccattggcagtgcttgatggctttggaactcatggtgtagatccttctattatgggtattgcaccagttggcgctgtagaaaaggctttgaaacgtagtaaaaaagaattaagcgatattgatgtatttgaattaaatgaagcatttgcagcacaatcattagctgttgatcgtgaattaaaattacctcctgaaaaggtgaatgttaaaggtggcgctattgcattaggacaccctattggtgcatctggtgctagagtattagtgacattattgcatcaactgaatgatgaagttgaaactggtttaacatcattgtgtattggtggcggtcaagctatcgctgcagttgtatcaaaatataaataataagaaaacaggttatcacaacagtattaattacatgttggcataacctgtttttatttgtttatggatttattgggtaatattagtcatttgatggtttaattgcaaatgctctaacagggaacccaggtgcatcttttggtttagggctgatagcgtaaatgatggcgccacgagttggtaattgatctaaattagttaataactcgacttggtatttatcctgaccaagaatataacgttcgccaactaaatcgccattttttacaacgtccacagatgcatcggtatcgaatgtttcatgaccaacagcttcaacacggcgttcttcaattaagtacttcaaagcatctaatccccaacccggtgcatgttgttgtccgttcgcatctttgttttcaaacttttcaatattaggccaacgttttgaccaatcggtacgaagtgcaacaaaagtgccaggttcaatagtaccatgctctttttcccatgcttctatatgcgcacgtgttacgatgaaatcattgttgttcgctacttctgttgaaaagtctaatacaattaacggcaataccaattcttttaaatcaatgtcttctaaataacgtttattctcgacaaagtgaattggtgcatcaatgtgagtaccatattgcgttacaatattccaacgttgcacatagaaaccatgatctttaaccgtgaataaagttgaaacttcgcctttttcaaactcactaaaacgtggtatttccggatcaaatgtatgcgttaaatcaacccaagttgcttgttttaaagtatttaattgttgccataaaggatattgtgtcataaaatcacccgtttttagtttattatatgataaatgctgcgattattcttggcgtttagctttaacagcattcacaagcacagtcaatgcatctttaacttcttcttcttttcgcgttttcaaaccacagtcagggtttacccagaataatgagcggtcgatttgttgtagtgaacgattgattgctgtagtaatttcttcttttgttggaatacgtggactatgaatatcatatacacctagaccgatacctaaatcataattaatatcttcaaagtctttaattaaatcaccatggctacgagatgtttcaattgaaataacatcagcatctaagtcatgaatagcatgaatgatttgaccgaattgagaataacacatatgtgtatggatttgagtttcatcacgaactgaagacgttgcaagtttaaatgataaaacagcatctttaagatattgttcgtgatattcagagcgtaatggtaagccttcacgtaatgcaggttcgtcaacttggataactttgattcctgcagcttcaagtgctaatacttcttcgttgattgctaaagcaatttgatcttgaacgactttacgtggtaaatcaacacgttcaaatgaccagtttagaattgttacaggtccagttaacatacctttaactggtttatctgttaagctttgtgcataaactgtttcatcaacagttaaaggcgctgtccattttacatcaccataaatgattggtggttttacggcgcgtgaaccatatgattgcacccaaccgaatttagttactaagaaaccttgtaatttttctccgaagaattcaaccatgtcattacgttcaaattcaccgtgaactaatacatctaagccgatgtcttcttgaattttaatccatcgagcaatttcattttttaagaatgtttcatatgcttcgtctgtaatgcgtttgttcttccaatctgcacggtattttcgaacttctcggctttgtgggaatgatccaatagttgttgttggtaaatccggtaagttcaaacgtttttgttgttgttcaatacgttgcgcgaatggtgattgtcttgaagtacgcacgctttcgaaatcataatctaagtttttgaatgattgattttggaaacgctcataacgtgcttttaatttatcatatttaacactatcgttttgattcaataggcgacgcaatgcatctaattcgtctaatttttcagttgcaaagcttaagccttcgccaacacttgtatctaatgtttcatcatctaaagatactggaacatgtaataatgaagatgatggttgaatgacaagctcattagtgtgtgctaacaatttgtcgattaagacttttttagcttcaatatcacttgcccatacattacgaccatcaataattccagcgtataatgtttttgatttatcaaaatctcctgcttcaatttgtttaaggttatagccattatcatggacaaagtctaaacctaaaccaccaacaggtaaagaacttaagaatttaagatgtgcacgttcaaagtatgtttgaatgactaattttttagcaacaccagctttttcgaaatagtcataagcttcacgtgtaatattttcatagctttcgctgtcgtctgtaactaagattggctcatcaacttgaatgtactcagcacctgcatcaattaatgattcaaacacttctttataaagtggtaataacgttttaactttttcttcaaaagtttggtgaccgccttttgataatttaacaaaagtaatcggaccaacaatgacagggtgagcgttaacgtttaaagattgggcatatttaaagcgatctaataatacattgcgactcactttaggctcaacattgtcccattcaggtacgatgtaatgatagttagtgttaaaccattttataagtgcacttgcaacatggtctttattaccgcgagcaatatcaaataataaatcatcatcaatagttcttccttggaaacgttcagggatgatgttgaataataatgacgtatctaatatatggtcatataaagagaaatcaccaactgggatgctatctaagtgatagtacttttgtaataataaattttctttatgtagatcagttaatgtttgatctaattcttctttagaaatcttctttgcccaataactttcgatggcttttttccattctctttttctacctaatcttgggaatcctaagtttgatgttttaattgttgtcataatattgcctccttgtgagcagtaatagattttgagtatgctgcaagttctaatgaatcttcgacattttgaaacggtgtgataatgtataaaccattaaaatattcatgaacagtatcgattaaatcctttgaaagcttaagacttagttctcgtgttttggctttatcatctttaactgcttcaaattgttgtaaaatttcatctgacatcttgattcctggcacttcattatgcaaaaagagtgcgtttttgtaacttgcgataggcataatgcctatgaaaaatggtttgttcaagtgcttagtggcatggtaaatttcaatgattttctctttgctgtacacgggttgtgttataaaataagacattccgctttctatctttttctctaatcttttgacggcaccatctaatttacgaacattagggttaaaggcgccagcgatgttgaagtgtgtacgtttcttcagcgcatcaccgtcagtgttaataccttgattaaatcttagagcgagttcagttaatcctttagaattaacatcatagacattggttgcacctggtaagtgaccaacttttgaaggatcaccagttatggctaatatttcgttaacgccaatgagcgataatccaagtaaatgggactgcaagccgattaagtttcggtctcgacatgtaatatgtacgagtggttcaatattgtaatattgcttaattaagctagcagcagcaatattgctaattctgacagttgccaatgaattatctgcgagtgttaccgcatctacattagctttatcaagtttagcgatattttcaaaaaatctatccgtgtctaaatgtttcggtgtatccaattcgataataacggttggacgttcttgaaccttagatgttaatgattgtctaactttattttgagatggattgaaaagtgctttcgttggtatcggaatcacttttttgtcattaacaggtttaagtgtctgaatagattctttaataaatttgatgtgctctggcgttgtaccacagcaaccaccaattaaacgaacaccttcgcgaattagattttgagcaacttgaccgaaatattgtgcattgtcactatacttaaattcactattttcaatatctaataagctggcatttggataacaagataagaatgcgtgctctggtaattcaatatgtgtgaaagactcttgcatatggtgcgggccatgatgacaattgagtcccacgatgtttgcaccacattgaacgagttgttttaatccttcattgattgcctgaccattaactaagtaatttgtgtttgaagcggttaattgagcaatgattggaatgtcgtatttctttctcgttcgtgaaatgacatttgttaactcttctaggtcgtaatacgtttcgaaaagtagcgcgtcaacgccttcttcaattaaggtgtctatttgaatttcagtatgataaagaatagtttgtaagctgatatcctcttgtttgatacctctaaacccaccaactgtgcctaatatatacgtatctttatttgctgctttttttgcgatgcgaacggcggcttgatgtattgctttaactttatcttcaagaccgaatcgttttaacttttcaaaatttgcaccataagtattggtttgaatgacatcagcaccggcttcaatatatgaacgatggatgcgttcaactttatctggatggctaagattatatgcttctggacaggtgtctaatccttcagagtataaaatggttcctatagcgccatcagctactaaaacattatctttcaattgtgtgaggaattgactcattgaatgcctcctttaatgcgtatttgatgtctgcaatgagttcatcaggatcttcgagaccaacacttaatcggaatagaccgaaagtgataccacgttcttgcctcacttcttcaggtagtgttgcgtgagacattgttgctgggtgcgaaagtattgtttccacaccacctagactcactgaaacgagtggtaatgtcagtgcatcgacaaattgttgtgctttagactcatcagctaaacgtaagccaataacggcaccgccatttttagcttgttctaaatgagatgcagtaagtcccggataataaacttctgaaatttcatcttgctttattaaaaatgacacgattttttgcgcgttttcgacagattgtttaaatctgattggaaatgtttttaaatgtttagcaagtgtccagctatcttgagcagataacatattgcctgtaccattttgtattaaataaagagcttcactaattgcctcattattagtaatgacagcaccagcaattaaatcgctatgtccacttaaaaattttgtagcactatgaatgacaatatcagcgccaagtaataaaggtgattgacctaacggtgtcatgaatgtattgtccacagctaccagtagttcatgcttttcggctattttagaaacagctttgatatcagtaattttaaaacagggattcgatggtgtttcgatataaattaattttgtgtttgattgaatggcaccctcgatttgttcgagcttggtagtatctacggttgtaaattcaatattaaatcgattcaaaatttgctcagtgaggcgaaaagtaccgccatatacatcatcgggtaagatgacatgatcaccagatttgaaagtcaaaagtactgctgaaatcgcagcaatacctgatgcaaaagcaaaagcgaatttcccctgttctaatcgtgctaacttctcttctaaaagttcacggttagggttgccacttcgtgcataatcatatttaacatcgccaccaagacttgtttgatggaatgttgaagaatcatagagtggtgggttagctgaatgatattccacacctctacgccaatcgaatatcacttctgtctcttttgaaagtgtcatacaatctctccaatctgagctttatctaatgcttggatgatatcgcgttcgatgtcttcataattttcaacacctagtgataagcggattaaatactcatcaatgccacgtttatctttttcagcatctggcatatcaacatgtgtttgggtgtaagggaaggtcactaatgtttcagtacctcctaaactttctgcaaaaatgcaaatgtctaaattttctaataatttagcgacgctataggccttgttaagtcttaaactaagcatgccagtttgcccgctatatagtacttcgtcaattgcttgaagtgactgacattttttagcaagttttctagcgtttgattgcgcacgctcaatgcgtaaatgcaaagttttaagtccacgtaacaacaaataactatctattggtgaaagtgttgcgccagtcatgttgtgaaaatcaaacaactgttgcgcgagtgattcacctttgacggttacgacacctgctagtacatcattatgtccaccaatatatttcgtagctgaatgtaagactatatcagcaccttctgctaatggtgttgaaagataaggtgttaaaaatgtattgtcgataattgacaataagcctttagctttacaaagttgatagtacggctttacatcaatagcaatcatttgtgggttagatattggttcaatgaataatgcaactgttttatcagtgatttctttttcaacttgttcataatctgtaaaatcaacgtacttaaatttgatattgtattgttgctcataaaattcaaataatctaaatgtgccgccgtataaatcgaatgaaactaaaatttcatcgtgtggtttaaataaattacatattaattgaatggctgacattccacttgatgtagcgaatgatgcaataccatgttcgagtttggcaaaacaggtttcaaatgttgagcgtgtaggatttttagtacgtgtataatcaaaacctgtcgattgtcctagttttggatgcttgtaggcagtagataaatggattggattcgctatagcaccggttgaatcatcggttaatgtgatttgggctaactgtgtatccttcatattaagaccctcctataagaaaaaataaaaaaagcttccgtccttcgtacccgaatgaatcggataaaaaggacgaaagcttatgtttcgcggtaccacctttatttgttattccatcgctgaaataaccttattcagtacgcattaaaagtaaatatgcttactgaacaattatcacaattaaagtcagtaagtaaggatatagtaatgtgctatcccatacttattaacaaaaaatcgtgcgtaaagaatccagtacgccatttaacatcaatgttaatactgtatcgctataacgggcgaacccgtagacacctcatattggcatcaacactccaaggccattttcaaacacgctttcaaaatcttctctcagctactaaagactctctgtataagcagggtgtgttttactttcctctttattgtgtttacgtttcattaaactgttataagatattaattagcttacagagtaaaaaaagatttgtcaacaattattcagaaaattttgatttaaaagttaatttgtttgtgaaattgtaattggtatcttgaagttgaaaaatgaattattttttaaataaagtgtggttaatggttgtctgactcatttagaatacataaaatatatttaactgttgttatcaaataaaaagtgatgtgagtgaattgtcaaaaagtgaagatcaacgtattactaaaacaaaagatgaacaaattaagcaaatagatatatcggatatcaaaccgaatccgtatcagccccgaaaaactttcgatgaaaatcatttaaatgatttggcagattcaattaagcaatatggaattttgcaaccaattgtgcttagaaaaacagttcaaggttattacattgtagttggtgaaagaaggtttagagcttcgaaaattgctggtctaaaatacgtatcagcgattatcaaagatttaacagatgaagatatgatggaactggcggtcatcgaaaatttacaacgagaagacttaaatgcgattgaagaagctgaaagttatcaacgtttgatgacagatttgaaaattacacaacaagaagtagcgaagcgattgagtaagtcgcgcccgtatatagcgaatatgttgaggttattacatttgccgaaaaagattgctgacatggtaaaagatgggcgactgacaagtgcacatggacgaacgttattggcaattaaagatgaacaacaaatgcttaggttagcgaaacgggttgttaaagaaaagtggagtgttagatatttagaaaaccatgttaatgaattaaaaaatgtttcgtcaaagtcggaaacagacaaagtagatataactaagcctaaatttataaagcaacaagaacgacagttgcgagaacagtatggtaccaaagtagatatatcaataaaaaaatcggttggtaaaatctcatttgagtttgattcacaagaagattttctaagaataattgaacaattaaatcgtaggtatggtaaatagttacacaattttatataataactctttgtgcaagtgtaaataaattgtaatcagtgaacatttgattctagatatattgagactttcgtaggttggaagtatataaaaatatgaatacaatattgatatatcatatagaagggagtaacgcttatcatgaatcaagtcatgaatattatttcatctctatttgagccattaacaaaaatagaaacatatgaaaacattgcaactaaaatcgctatgattgttatttatattatcgtagccctcatagttattaaaatactgaataaaatgattgaacagggatttaagattcaaaataagagtaaaaagagtaacaaaaagcgctctaaaactttaatatctcttgttcaaaatgtagtgaagtatatcgtttggtttatagttattacgacgattttaagtaaatttggcattagtgttgaaggtgttattgcaagtgctggtgtcgtaggtttagcagtaggttttggtgctcaaaccattgttaaagacgttattactggatttttcattatatttgaaagtcaatttgatgtaggtgattatgttaaaataaacaatggtggtacgactgtggcagagggaacggttaaatcaataggacttcgttcaacacgaatcaatacaatttcaggagaattaacaattttaccaaatagtagtatgggtgaaataacgaactactcaattacaaatggtacagctatcgttaaaattccagtgtctgtcgaagaaaacattgataatgttgataaaaaactaaacaaactatttacttctttacgtagtaaatattacttatttgttagtgatccggttgttattggtattgatgctattgaagatacaagagtaatattgagaatatctgcagaaacaattccaggtgaaggatttgctggagctcgaattattcgcaaagaagtacaaaaaatgtttttacaagaaggtattaaaacacctcaaccaattatgactgcttataatcatagtgaaaacggtgtttagtagtttataatacatggaggtcatatttaatggcgtcaaaatatggaataaatgatatagtagaaatgaaaaaacaacatgcgtgtggaacaaaccgttttaagattattagaatgggtgcagacataagaattaaatgtgaaaattgtcaaagaagtattatgattccacgtcaaacgtttgataaaaaacttaaaaaaatcatcgaatctcatgatgatacacaaagataggagaatgattaatggctttaacagcaggtatcgttggattgccaaacgttggtaaatcaacattatttaatgcaataacaaaagcaggtgctttagcagcgaactatccattcgctacgattgatcctaatgtagggatagtagaagtgccagatgctagattacttaaattagaagaaatggttcaacctaaaaagacattgccgactacatttgaatttacagatatcgctggtattgtgaaaggtgcttcaaagggagaagggttaggtaataaattcttatcacatattagagaagtagatgcgatttgtcaggtcgttcgtgcatttgatgatgataacgtaactcatgttgctggtcgagtagaccctattgatgatattgaagttattaatatggaattagtactagcggacttagaatctgttgagaaacgtttgcctagaattgaaaaattagcacgtcaaaaagataagactgctgaaatggaagtacgtattttaacaactattaaagaagctttagaaaatggtaaacccgctcgtagtattgactttaatgaagaagatcaaaaatgggtgaatcaagcgcaattactgacttctaaaaaaatgctttatatcgctaatgttggtgaagatgaaattggtgatgatgataatgataaagtaaaagcgattcgtgaatatgcagcgcaagaagactctgaagtgattgttattagtgcaaaaattgaagaagaaattgctacattagatgatgaagataaagaaatgttcttagaagatttaggtatcgaagaaccaggattagatcgattaattagaacaacttatgaattattaggattatcaacatattttactgctggtgtgcaagaagtacgtgcttggacatttaaacaaggtatgactgcacctcaatgtgctggtatcattcatactgattttgaacgtggatttatccgtgccgaagtaacaagttatgacgactatgtacaatatggtggcgaaagtggcgctaaagaagcgggcagacaacgattagaaggtaaagaatatattatgcaagatggcgatatcgttcatttcagatttaatgtataaacgatagagtgaagttaattaaatagtatatatggagaagaggcggaatcaattgttcgcctcttttaattatgcgtataatttattaaaagaatggaataattttactcgcgttaataatatcttgagtgctgaaaaattgtttgccttcgccagtataagcaggctctaaaacaagattagcctttgcacaataaagccattcaggatgaatgccactattaagtatctcttggaattcttgaaaatctttagaccaatcaatatttaaattcattccttaccacctcacaactattatagaacacgtgttcgcttttgtgaagtgtatttttaaaaatatcatagaaaatttcaaatgaattaatgtcaaaaatgatatgaagagtagtttgaattattattgtaaaaagtaatggcgcatgatataattctttattgtgagtaatgaaaattattccttgcttatctgttttaagattgataagccgtatagaccacaaggaggtgcaaatataaaatgagaacatatgaagttatgtacatcgtacgcccaaacattgaggaagatgctaaaaaagcgttagttgaacgtttcaacggcatcttagctactgaaggtgcagaagttttagaagcaaaagactggggtaaacgtcgcctagcttatgaaatcaatgatttcaaagatggcttctacaacatcgtacgtgttaaatctgataacaacaaagctactgacgaattccagcgtctagctaaaatcagtgacgatatcattcgttacatggttattcgtgaagacgaagacaagtaataattagagggggcgtttaaatgctaaatagagttgtattagtaggtcgtttaacgaaagatccggaatacagaaccactccctcaggtgtgagtgtagcgacattcactcttgcagtaaatcgtacgttcacgaatgctcaaggggagcgcgaagcagattttattaactgtgttgtttttagaagacaagcagataatgtaaataactatttatctaaaggtagtttagctggtgtagatggtcgcttacaatcccgtaattatgaaaatcaagaaggtcgtcgtgtgtttgttactgaagttgtatgtgatagcgttcaattccttgaacctaaaaatgcgcaacaaaatggtggccaacgtcaacaaaatgaattccaagattacggtcaaggattcggtggtcaacaatcaggacaaaacaattcgtacaataattcatcaaacacgaaacaatctgataatccatttgcaaatgcaaacggaccgattgatataagtgatgatgacttaccattctaataaaaattaacgaaattaaagcgaaaaaattatcaaaggaggcacacaatcatggcaggtggaccaagaagaggcggacgtcgtcgtaaaaaagtatgctatttcacagcaaatggtattacacatatcgactacaaagacactgaattattaaaacgttttatctcagaacgcggtaaaattttaccacgtcgtgtaactggtacttcagctaaatatcaacgtatgttgactacagctatcaaacgttctcgtcatatggcattattaccatatgttaaagaagaacaataatatataatttattgtcaaaccccgtaggcataggcttacggggctttttgtgttttggggtatagaaaaagggcaaaaaaggatgatgtgaatgttttgtgttcggaatttgcacaaagatatgtttatattgcaaaaataatatgaatttagatgcataaaaaaagaactacgcattttaaataaaatgcatagctcttctttttcttgcatacgaattaaaataactcgcgagacctataagtctctttcctcactagatagtttatacttttggtctgttgaagtcaataattttatctaaagctataaaaaatcttttgatagctaatgcattattataatagctttcgtttcttttatatcgcttttgaagttggtccaaatcgtgatatcttgcttggataattgcattactacaaacttgattatgtaattctagcgtagcgaaagtatctatgaaattttttattccgaacatgtttctagatatgcctatattattccctttttcaaataaatattgaggagatctactgtcataatttagatttgctatgatgggttggttatgagctgatttgtttcttatatttttaactaaaggcattaaaatattagcaactctcaattcttcgtcattgtacttcttgtaatagaagttgagaaacgaaacgaattgacctagttgcatgaattcaatgcaaacccatgcgggtggattttgatagtatttattcaacttctcgggtagttgccctcgtttattcatatgcttgaatatttcgtttttatttttgattttggtttccataacttcttctggtgttcttgaatttgtgtcaaaatttgaattgctatatgatttatcaatacataagaactcatctattattttataaccatcttcttggttattttctgttattagttttaagactagacactttaaactatgttcaatatctaaagttaaatgcaacattgtgtatcttaatttcatatctatagttgctaaatctgataaataagcaaattctatgaaatagccgccattctttttttcgaaattttttcggaaataagctagtttgaagaagtgattattttttctaagaatttcatttgctttttcggtgtcaataatattaaaaaatatattcatctgttttaatttcgctatttgctcatcaaaattgagcataggcttaatttctgctagtgtatcatctttttccaattttaactccccaatcattcaaatttattcatcatatctttcgccatctgattagtaacatgtgtgtatatctctagatttttttataatctgaatgacctacatgctcttgcattgcttttaagttaattcctaattgagcaagtgtagatatatgcgaatgatgtaatgtatgcgtcgttacaggtttcttaatagaactaatctcagttgtctctttgatagtgccccctttaataatgttgctaattttgttcgagtcgatagggccaccagctgcatttgtgaatatgtaccctatattaataaacttatcattacaagcataagtgttcttagtaagtcgatgctatggatagtgaggcctatagccctatagctgttacttgttctagttgtctcttttactccggatgctcccgtcatttttcagttatccaattaactttaccgtcgatatctagcgttttatcttcatagtttatatttactctctttattgcaagtagctcaccgatacgcatgtcattagcaatttgaaactgtaccatagcttttaccattttataattacgttttgtcgttggatatttttatacttaattacatagtcgaaacaatccagtaactccttatcttcattatcttctaaagtgttattacgtttagctagtaacgcatcactatagggatatctattttatctattacacatataactttgaattgcttactattttaaattaacaaattctattctcttagatttagtccaattatgtgtagacgatttatagttattaaattcagagtggtagcaaattaaagttaatcaagagttaagatgaatttaattcatgagcacgtctattatttttataattgaagaaaataaagttttacttcaaggaggtaattaaatatgttcaaaaaaaatgactcgaaaaattcaattctattaaaatctattctatcgctaggtatcatctatgggggaacatttggaatatatccaaaagcagacgcgtcaacacaaaattccccaagtgtacaagataaacaattccaaaaagttgaagaagtaccaaataattcagaaaaagctttggttaaaaaactttacgatagatacagccaaaatacaataaacggaaaatctaataaatctaggaattgggtttattcagagagacctttaaatgaaaaccaagttcgtataaatttagaaggaacatacagagttgctgatagagtatatacacctaagagaaatattactcttaataaagaagttgtcactttaaaggaattggatcatatcataagatttgctcatatttcttatggcttatatatgggagaacatttgcctaaaggtaacatcgtcataaatacaaaagatggcggtaaatatacattagagtcgcataaagagctacaaaaagatagggaaaatgtaaaaattaatacagccgatataaaaaatgtaactttcaaacttgtgaaaagtgttaatgacattgaacaagtttgaaattaagttgaattagtatatacagtgttttattgctaatactttgaaagttaggtatctaaaggtgcctaactttctttgttatgattagcaccatcatatagaaaattctttaatgacgtttatgccgaaatctacaaaaataatttctcttttatggttaatcaatatgtttttacattcgacaaccttaaaattaacttctttcaattccataataaagtctctataaaataacttagtttaaaaacgattcatatctttcagattcaaataccatcattttctactaatacttacactttaattacaattatgtaagttgttttcagagacatcctattttatattttgtcagaggtgatcttttgaaaacgattttaaaaacaataatatatcttgcacttactatcattggcgcttatgctgctttattcattttaaaaacaatagactctcatggtataacagatcaatttaacccattagtaaagaaggatgattcttatgttaaaacgacagaggtgtctactagaatggatgatcaactccgaagttatagtcaaagtgtttttaataaagaagggaaagagacgcaattaatgtatactgctacatttgatgttaaaccgcatagatacttgaaaattacacataaaggtcatcatgtagaaacttttgaagaagttgaaaaggaagaagtaccaaagaaagcattagacaaactgagtcgataatagcatgcttatattacatggttcatttataaaaggagtacgaacgaaagtagcgcatgacgagtaatttaaaaatatttgtaataattatgaataaaattaaaaacaaggggtaatacattctatatagcatataagcttttgttatgagtttcaaaaataggaagagagagtgatattatgaaattaaaatcattagcagtattatcaatgtcagcggtggtgcttactgcatgtggcaatgatactccaaaagatgaaacaaaatcaacagagtcaaatactaatcaagacactaatacaacaaaagatgttattgcattaaaagatgttaaaacaagcccagaagatgctgtgaaaaaagctgaagaaacatacaaaggccaaaagttgaaaggaatttcatttgaaaattctaatggtgaatgggcttataaagtgacgcaacaaaaatctggtgaagagtcagaagtacttgttgctgataaaaataaaaaagtgattaacaaaaagactgaaaaagaagatacaatgaatgaaaatgataactttaaatatagcgatgctatagattacaaaaaagccattaaagaaggacaaaaagaatttgatggtgatattaaagaatggtcacttgaaaaagatgatggcaaacttgtttacaatattgatttgaaaaaaggtaataaaaaacaagaagttactgttgatgctaagaacggtaaagtattaaagagtgagcaagatcactaaaatatgtcgtgatactaatgataataacaggtcttaattcatattaattattaaaataccctcacaacgcaatgtaatatatccagtatagatttgaaaggatatatgccaaacgtgttgtgagggtttatttgcatctatttatccatgcgaatatcgacttcttctaaatgtttctgatattctttaaccttactttctaaaaacatttcatatggtgcatcaaagaaatcagctaaatgcatggcgtctttaaatttaggttcatggtgatgattctcccattcccaaatttgatgtgcttcatatttagtaccatatttctcatttaattgttgtgctaattcgtcaatttctaaattatgtttagttcgtaagttatataaaatatgcatattcattgttcattaacctcgcttcttgatttaaaattcaaagatgctctaataatatgtgtatattctagtcctataacataaaataatcaagctatgaattcggcagaaaaaataatgtaaatgtatataatattgccagtacagagactttaaataacgatagctacattgaataaaattgatattcaattactacttttaaaaatatttggataaaaataatttgaatttgttttagaattgtaaataaggggtactacttagaataacgcaaaataaatagaaaaaggagactgaaaattatgtttggatttattggaatgttaattgtcggtggcttaattggatgggctgctggtgctattatgggtaaagatatcccaggtggtattttaggtaatattatcgcaggtattattggatcatggttaggtggaacgttattagggcaatggggtcctgaaataggaagaatttacatcttaccagcattaattggttcaattatcttaattgcaatcgtaacgttaattttaagagctatgcgtaaataataaaaaattcaattggaaattgaattaatataaagatggcattcagttgtcatcttttttatttgcgtgaaaatggtcaatatgtattataatatttaaaaatgtaggtaagataggattaaaaagtaataaattaacatgaggagaggttggaaataaaaaagcgagtatttgacaaataaaaaaaggatgacgttgggttgcgccatccaggagtattatgttcatgaatataaaagactgtgtagtcatttaagaactacacccatatagtaacacatcacttgattaaagacaatactatttttagagtcattaatttaaaatatgaattaattatttttttagaatagaatattaagattgatatcgaattagtagtcaaagtgttatggtagatatgaaatacataaggtaaggagtaatattatgacgatttatttagttagacatggcgaatcaaaatcgaattatgataataaacattttagatcttatttttgtggacaattagatgtgccgttaacggatactggcacaaaaagtgcggacgatttatgtgattattttaaagagaaacagattaaacatgtatatgtttcagacttattaagaacacagcaaacgtttgaacatatttttccatatgacattgcatcaacgactacgcctctattaagagaacgttcacttggcgtatttgagggtgaatataaagatgaaatcagtgcgaatccgaaatatgaaaaatatttcaatgatccaaactttaaagactttcgtcatagtttttcacaaaaagcgcctgaaggagaaagttatgaagatgtatatcaacgcgtagaacattttatgaatcatgttgtcaatgaagatacgcaacaagatgatatcgtcattgttgcacatcaagttgtcattcgttgtttaatggtttattttaataacgtttcacgggaagaagctgtggatttaaaagttgaaaattgcaaaccatatatcattgaatagaagtatagaggttctgaaaagctgtgttttatagtggccttcagaacctttttggcatttggaatttaatgggaatcattcttatcaacagacttaccaccaatagctaatgtgataattgtgcttgtgaacaaaataattgaagttataaatgacgctaatgtaaaaggtgtaaattgtgtgagcgataatatcaatgataaaaagaaccaagagatagcccctagaaattgtaaaatagcagaagaaattctaaaactcatataatcatatatagctaaaacaagtgaaggtaatgcgactaataccattataatgatgttgagggtgaataaatatggctgttcaaaagttactgtgcttggtcctgttggatgcattgctgctaagaacaagcaaacaatcgtcgataaaattgataagataataaaagtaattcgaactttcatcatgaccatcctttgtttatagagtcaatataagtatggaatatgttaggtatatagtcaaatgcgtcaactaatgggtgattttggcatagatagagaatttaaggcaattaaaaaagcatcaaacagtaatatgctgcttgatgcccaaatgatgactttagctaaattgattagtcacttttaaagataaagaattgtcatgaattaaagctcatgtaatgatgtgttacatgtcgcaatgatggctttcagttatttatcgataacatcactcttgatacctttagattttaagaaatctttaattttatcttgttgctttttattaacatcaccggcatattttgttggcacgtcgactacattgattttattttgcggttgatagctaagcttttcaatatcttcatcaacattggcgattgtactatttaaagctttgaagtaattcatcattaattcaacgggtttcttatattctttaggaatattgttttcagtgacaaatttcttgaaatgcaaatcgtttttaacagctaagttagataagtggctaagtgtttctgcttgtttttcagtcacttttgtttgactgtcaatttgtttatctagtttatgttgcataatatatttgttatcaagtatatcgctatttacagacaaatacttttctatagcttgcttcatctctgcatcactaatatcactatttttcttatctgagttaaagatatcttttgtttctaattttttagcgcttttaggtgcatggatgccagtacttgtgtgatgatcttcgttatcagattgatcggacgcgcaacctgtaagaattaatgcagatgctaaaaatgtacttagtagtaatctctttttcataatgtaatataactccttagtttatctttaattgaaaaaatgtgtattcatgtttaatagagtaacattgaattagtttggaatgtcacgatgaccttgcaatgaccatagacgtaaatgattacgtgcatgagttgctttttctatcaataatgcgtcgttttgaacgttgttaaggatagcattatctataaataactgcataattggttgtatcaatttagacgtaggtatcgtacgtaaaagcataataatttcgttcacatacttttccttctcaatatcatttttcatattgatttgtttgcgtagataactggtaaactctttaattgcttgatcagatttcaaatagtgatgtctatcataatagattaattcttcaaccgaagctggtacataatatccatcatcagaaatatcaatgccagacgcctcagactcgacaacatcaaataacacaggatgaaacacgaagtcatcttcaacataatatagctcagtaccagctaaagtatctaagctatattgtaactcttctttactaaaagtagcgtcataaaatctttgtaaaagatatagtagatgattagttgataaaataccatacaagtttacagaaccaagtataatacgaagaggtaaaatatcttttttatctattaatcctttcttaatctcagaaatcaattgagtgattgcatcacttcttaagctatcggttgtaccaaaatcttcaaagtcatcatcttcaagtaacatatctaagtcaacttcgtcttccataaatgataattctaacgcgtttttaaactctgctaaactattctcaattgtttgctcatcaacaaattgatttacagctttctcaaaataaccattgccgacttgattcacgaaattttcaatatgtttacgcacatcatttggcaaaataagacaatcatattcaaagtcgtaataataataaaaatgaatagttaaaaagttatcaaaatttattaattgcagcttttcaaatttagttagttcattgtttaatcggtagttatcatcactttcaagtatgctagaaagaatatcaaactcaaatagagtagcattagaaaacacttgttcaatgatgtgattattattgaaaaatgctgtcataattaattcaacaagattttgtttgtttttatttgagaatcctttgataccatactgcctgcatattgtttttagctcgtcattagtttttaacagtaaagcatgttctaatgtgacatcgtttaagcgcgtatgttgtcttacacgtaacacttcttcatttaaattcatatggtttattgtatctaacgattcgaattcaccgtatgcattatctagtacctctgaattgatatatcttaaaaagaaattatttacaaagaactcatcttcgttaagttgataaacaaaacctaggtgatttgttagctttaacatattaacatcacggctatttacgattgtgacagggttacccttagatattaatgtttctataaatctttgttctgaattatccatatcatgataaattttatgtatattttcaggacgtaaagcatgaatcgtgacttcaaatccttcttttgaggtcgataaattaaaatattcgcatgcgttttgtaattttcctgggtagataaaatgaacatcaagcatttttgcacacctcgttgtatatattaagtttatcataacatgattttatgtcgggataaaaaaataacagcatcttaacaaatgtaagatactgtcagtgaaactgtgaaaactttagtttctgataatatagtcaaaggcatttaatgctgcatttgcaccagcgcccattgaaatgataatttgtttgttcttctgatctgtgacatcgccagcagcaaatattccaggtacgttagtattattgttgcgatcaataacaatttcaccacgttcgtttaattcaacagcatcttttaaccatgatgtgtttggaagtaaaccaatttgaacaaagataccatctaagttaagtagatgttcttcgccggtgctcatgtcttcgtaacgtatacctgtaacatggtcttctccgacaacttcagtagttttggcatttgttttgatatcaacatttgataaagaacgtaaacgatcttgtaacacgttgtctgcttttaattcgctagcgaattcgaataatgtaacatgattaacgataccagcaaggtcaattgctgcttcaaccccagagttaccgccaccgataactgctacgtctttattttcgaatagaggtccgtcacagtgagggcagaatgcaacacctttattaatcaattgctcttcacctggaatgtttagcttacgccaacctgcaccagtagcaataatgactgttttactttctaagacagcaccgttttctaacgtaactttaattgcttcgtcagtcttttcgatatctgtagcacgtatacctgtcattgcatcaatgtcatattgatcaatgtgcgctgctaagttagaagaaaattcagaaccagttgtttctttaacagtaatgaagttctcaataccagcagtatcattaacttggccaccgatacgatcagcaactataccagtacgtaaacctttacgtgctgtgtaaatcgctgcactaccactagcaggaccaccaccaacgattaagacatcataaggttctttattttcaaactcagatgcatctgccgtactgcctagtttcgaaagaatatcttggattgtcatacgaccattgccaaattcttcgccgtttaaaaagacagcagggactgccatgatgttttcagattcttcacggaacactgcaccatcaatcatagaatgcgtgatgttagggttgatcacactcattaagttaagtgcttgaacgacatcaggacatttttgacacgttaaactaatgaatgtttcaaaatggaatgaaccttctaagtttttaatttggtcaataattgactgtttttctttaggtgcacgaccactaacctgtaaaattgctaaaacaagtgagttaaactcgtgacctaatggaattcctgcaaatgttacacctgtttcttcgccaggacggttgactgagaaacttggtgtacgttttaaagacttttcagaaagtgaaagtctaggtgacatatcagaaatttctgttaataattctttgagttccttagatttttcatctgaaccaaggctggcaacgaattcaacgttgccctccattagttctaataattgtttaagttgttgttttaaatcagcattaagcatggttgtaatgcctccttagattttacctactaaatctaaaccaggttgcaatgttttagcgccttcttcccatttagctgggcatacttcgccagggtttttacgaacatattgagctgctttgattttgtgagctaatgtactagcgtcacggccaattccgtcagcgttaatttcagatgcttgtacaacaccgtctgggtcgataatgaatgtaccacgttgagctaaaccagtagcttcatctaatacatcaaaattacgagtgattgtttgtgatgggtcaccaatcatagtgtaagtgattttgctaattgcatctgaatggtcatgccatgctttgtgtacgaagtgagtatcagttgatactgagaatacatttacgcctaatttttgtaattcttcatattggttttgtaagtcttctaattcagttggacaaacgaatgagaagtcagcaggatagaagcatactacgctccaagaaccttttaaatcttcttgtgtaacttctttaaattgatctttttttggatcgaaagcttgcgctgtaaatggtaagatttctttgttaattaatgacataaatatcttcctcctaagaatttaagtatgaattagaactatcaattgattgtgcttaattataataattctaatctcttagttagcattattacattttgatccagaatagtcaactggataactttgtaaagtgaatgattacttttaaaataaagaaagataatataaagtgctttgatattggattttgtagttgatgatttaaaaggttgtgtctatatttaatatcttgattttaatgtaaaaaatgtaaaaaaagaagatttgtattctcaactaagtcaaccttattgataatggtgtgagaatatttgttcgagatggatgaaggtaatgagtgagaaactggatttttaaagtatgagacaatatttttaaaagttcaattattaacttataagcaaataattgctataaaaaagtttggacgtgtacaattgcaatatgaagattttaaattaattgtaaagtatcgaggagtgggtaacgtgtcagaacatgtatataatcttgtgaaaaagcatcattctgttagaaaatttaagaataaacctttaagtgaagacgttgttaagaaattggtagaagctggacaaagcgcttcgacgtcaagtttcctgcaagcatactcaattattggtatcgacgatgagaagattaaagaaaatttacgagaagtttctggacaaccttatgttgtagaaaatggctatttattcgtctttgttattgattattatcgtcatcatttagttgatcaacatgctgaaactgatatggaaaatgcatatggttcaacggaaggtttgctagtaggtgcaatcgatgcagcattagttgccgaaaatattgcggtaactgctgaagatatggggtatggcattgtctttttaggatcattaagaaatgatgttgaacgagttcgagaaattttagacttacctgactatgtcttcccggtatttggtatggcagtaggggaacccgcagatgacgaaaatggtgcagccaagccacgcttaccatttgaccatgtcttccatcataataagtatcatgctgataaggaaacacagtatgcacaaatggcagattacgatcagacaatcagcgagtactatgatcaacgtacaaacgggaatcgcaaagaaacatggtcgcagcaaattgagatgttcctaggaaacaaagcaagattagatatgttagaacaattgcaaaaatcaggcttaatacagcgatagcaagataccaaaataacccgccccctctagcttaaaatgataagtatagctagagggggcgggtatttcttgcaatgaattagtgtgaagttaatgcagcattatcatttgattcgaaagtatctttgtcccaatgtttagttaacttggcggtacctgtaccagctagcattgaatcgttcacgtttaatgctgttctacccatgtcaatcaatggttcaacggagatgagcacgccggctaaagcgactggcaagtttaacgttgacaacaccaatatggatgcaaatgtagccccgccaccgacgccagcaacgccgaatgaactaataatcacgacagcgattaacgttacaataaattgtaaatcaatttctacattagcgacgggtgcgaccataattgcaagcattgcagggtaaatacctgcacaaccattttgtccaatcgacaatccaaatgttgcagcgaaattggcaataccctccggcacgcctagacgtcttgtttgtgtttgtacatttagcggtaaggcacccgcgcttgagcgtgatgtgaatgcaaagattaatacttccaaagtctttttaacatagcgaattgggctaatacctaacagacttaaaataactaagtgaatgatatacatcgtaattaatgcagcgtacgatgcgattaagaattttcctaaagtccaaatggcaccaaagtcacttgtcgataacgtgttggccataattgctaatacaccgtatggcgttaaacgtaagacgaacgtcacaatcgccattactagtgaatagatagcgtcaatcgcactcttaagcaattcaccatgatcaggttgtttgcgtgctacgcgtaaataagcaaatcctataaacgaagcaaatatcacgacagcaatcgtggaagttgcacgttgtccagtgaaatctaagaatggatttttaggcaataattccaaaatttgttgtggtaacgtatgtgctgttaaatctttcgcttgtttagcaatttcgcttccacgtgcttgttcagcgttaccaagattaattgttgatgcatctaaaccaaacaccaaggcatacacaacaccaacaattgcagcaatggtgacagtgccaattaaaaagataaaaatgagactaccaattttagcaaacttttctccgatttgaattttagtgaatgcagcgacaatagaaatgaaaattaaaggcatcacaatcatttgcaacaatgcaacgtaaccttgtccgacaatgttgaaccagtcacttgttgatgtaataacattcgaatgtgttccatagacaagatgtaataacacgccaaatacaatgccgatacctaaagctgtaaacacacgtttcgcaaaagatatatgtttgcgagccatcatgtgcaatattacgatgaaaatcaccaatacgataatattaatcagtgtaagaaaagcattcatgaacgtcactcctcaaatttttgaatataattccgactagtatgctaagaataatattaattttaaaatatttcaagagggcatttgcaattaaatgtaaacatgatgaaattcgaccgttggcataagggaatttgtaaacaaatcgttttgaatttagtagagaaaggtgaaaagggttaatagtgttatgacctagtcgattaaagttgatatttgaaaatgaagcagggcattaaatgcaataaattaaataagttgtcattacagcgttaataatagaaatgattttaacaggaaaaaagtgatgaatatttggaaaagatatatatcgtgcactgtcataagagataagatatgagaaaacaaatttatccttgaatcgagatgtggctatggcggtttgataaaaattgctaacctcatatttattgaatgaaaagataataaatgatcaaccttgaaaagacgcttcgaacaaacacgttgtaaaaaattctgtcgaatcaaaattagcatcttttgagtgttcgtgtgtgcaggtggtagttcaaaagctaccgtaaacaaatatttttgtttgagcaaaaaggcgtttgtagtaaatgtgaatatgagtgtgcacttgtgcgattcgtcagttactaacacagccaaacatttaaattgaatggacttattaagatgaatctatttagaagtacacagaagccatcccatttaaaagtaacatactataaaaatttattcaaaattcaatattaatcataatgaataattaaaaaacctgaaacaaattagtttgatatgctctcttcaaagtagatattgaatggagtatatcagcttgtttcaggttttatgaattgagtattaaatttgaaagtaaattacagttctataggtttataaaaaatcagtttttaaatcaaagctatatatgaattgagtattaaatttgtgttcaaatcacaagtttacaggttgaataaacgtgcgaagaaaccttttttctcttcttgaggttttggttctgacatttctgactgtgaagctgtgctgtcattttctgctttcgcttccaatgaatcgttcgaagtagcttgtttagaagcttctgcatgggcttctgctacttgttgttcagcatcatgttgcgcgtctgcatctactgtagcttctttatttgaagtctcagctgcattttcatttttagactgctcaacgctggctttttcaattgcttcagttgcagaaatttgatcctctttatctactttagtagcagtgccatcgcctgcattttctgctttagtatccgtcttagcgtctgttgatgtagtcactccagcaaccttcgaatctttactgtcagctttatcttcagtaacagcattcttttcaactttatttgttgattcagccaatactttagcttgagatgcttgtgcttcttggatagcctcttgtgatgtttggatggcttttaaggattcgctatttgaatcgattttagatgtaagttgattttgaagttcttttaattcttgttgttgctgatgtacttgattcatcatttgaccaaataggtgacgttcttcgcgcattttctggatttctaggcgtaaatcttctactagttgagcgacattttgattagtaggtaagtttttgtcatcgtttttgacaatgacttgcaggaagtctttttctttttctaattcatcaaacgctagatcataactatttgtttgttttactttgtcggcaatgtctttgaaaagctcgatatcttcttctttgaaatcagttgcttcacgaccacgatattcagtcttgcttagttggtaaccacgttcttctaaatgttgaacaattttacggacttgcttctcacttagttctacgcgttgtgcaaattctttagttaacatactttaaagtcctttctgcatatactttatgtatactgacgtttgtctacgggcagtgaaacgtcagtcttgcttcatacatagtttaaacgttattgttagtgatttcaagtttgtttaaaatggtttacgtaaatccatttcttctaataaagcataaataatttcacgtgcgataccattggcaaatacatacttcaaaatataatttgatttaacacttgtaccgtagatatcctttgtcagtttaatatttttctttaaaaataagtccacttttttagtgtgaccatcattagttggatgaatgtaatcaatttcagtttgtctttcaaattgatgttcgtataaaaactgtctacggtgttcaataatgaggccgttatcttgtgttaaatctgcaggttctttagggacttccatcattaaaaagttaatacttctagaatgaacaaggtttgataataagtttagttcatgttcaatttgatgtaatgtttgtgtcattaactcatcatggttgggtaggtcttttgcgaataaataaattaaaaatgctgaattggttgtggcttcataatgtgcagttgctagactgacaacaacatcgttttctaagcctacgataaaaacataatcgttttcagttttgttgttttctaatgagcgtttgatgatacgtttatcttcagttaaagataaatttaacttagtatcgtaaagtttaagtgcttcgttgtaatgtggatctttgacagattgaatggttttaaattccataagaacacctccccaatttaattaatattatagcataatcgcctgctataaaagactgttcataaacttttaaatggtataaaaaactgcactatcttaaattagacagtacagtaatctcattttgaatttagtgtgataactaagctttgggacctttagatgcttcagcaaaatgagtaatatcaatttcttcatatgctgagttatgttcttgaacttctttatgtgatgatttgtcacgaaccgctacaactaacattttatcgtctaaaataagttgtttatatttttctaattcatcaggcgctaagttgtagcgtgataaaactgcatgttcaccatcttctcctgttaacagtttagtcattctatcactaaatgttccacttgttgagataagggagatttcagagtcgtgtaagtcatttaggtgtaatttacttttactaataattgttagctctgattctaaataaccttcagatttcttttgattgattacgttgtataattcgccagtgtcatttactacagtaatatctgccatagttgtcgcccctttaaaaatttgtttatttaatcttttacccttcttattataaagtaaaacccttacattattaagttataagtcttcattcgcattaaacgtctctgtacatttataaaactattaaaagattacctaagcagttattgaaaaaatgccgaaaatttgctattatcgttaaataatttacataaactcatataatctaaagaatatggctttagaagtttctaccatgttgccttgaacgacatgactatgagtaacaacacaatactaggagtagcttcagccattaaattgtaaccatggtgggtgatttatatcattttatatgatggtcacagtttatttgatgaaacttcttttacattgattgcatgacaaattcgttatgcatgttcgttcactcataaaccctgaaactattatttagtttggggatttttttgtatctagcaccaatttaagagcaaaatgtttcacacaaatctgaggaggttttaagagtggagttactaggacaaaaagtaaaggaagacggcgttgtcattgatgagaagattttaaaagtcgatggatttttaaatcatcaaattgatgcaaagttaatgaatgaagttggtcgcactttttacgagcaatttaaagataaagggattactaaaatcttaaccattgaagcttccggtatcgcacctgcaatcatggctgcactgcattttgatgtgccatgtttatttgcgaaaaaagcaaaacctagcactttgacggatggttattatgaaacatctattcattcatttactaaaaataaaacaagtacggtcattgtttcaaaagagtttttatcagaagaagatactgtacttatcatcgatgactttttagcaaatggtgatgcttcattaggattatacgatatcgcacagcaagcgaatgctaagacagctggtattggtattgttgttgaaaagagtttccaaaatgggcatcaacgtttagaagaagcaggtttaacagtttcttctctctgcaaggttgcttcactagaaggaaacaaagtgacattggtgggagaagaataatgaaaaatttaatcctaagtgttcaacatcttttagctatgtacgcaggtgccatcttagttccaatcattgttggtacaagtttgaagtttacacctgaacaaatcgcttacttagttacagtagatatatttatgtgtggggttgccacatttttacaagccaataaagtaacaggaacaggattaccaatcgttcttggatgtacattcacggctgttgcgcccatgattttaattggtcaaacgaaaggaatagatgtactttatggttcgctatttttatcagggatattagttattatcatcgcgcctttcttttcacatcttgtaaaattcttcccaccagtagtaacgggtagtgttgttactatcattggtatcaatttaatgccagtagcaatgaattacttagctggaggtcaaggtgcaaaggactatggagatgttaagaacattttgttaggtttaatgacattaatcattattcttgttttacaaagattcacaactggatttattaagagtattgccatattaattggactcgttttaggaacgataggtgctggcttacttgggatggtcgatattaatcaagtcaatcatgccggttggttaggcatcccagtgccgtttagattctcaggatttagctttgatgtgacatcgacgttagtgttctttattgtagctatcgttagtttaattgagtcgacaggtgtctatcatgcgttaagtgaaattaccggtaagaagttagaaagaaaagattttcgtaaaggttatactgcggaaggtctagcgatagtattaggttctatatttaattcatttccgtatacagcctattcgcaaaatgtaggacttgtttctttatccggcgctaagaaaaacaatgttatatacggtatggtcgtgctattaattatatgtggttgtatacctaagcttggcgcattagcaaatatcataccgctacctgtgttaggcggtgcgatgatagctatgtttggcatggtaatggcatatggtgttagtatattaggacatatcgattttaaaaatcaaaacaatttattaattatcgctgtatcagtaggattaggtactggtataagcgctgtaccacaagcatttaaaggtttaggtgaacaatttgcatggttgactcaaaacggaattgttttaggcgcaatctctgcaattattcttaatttcttttttaatggaataaagtataaacaaacggaagaaaatgtgaaataatataactaattaatttgaaaaatggaggctgtttttaatgtgggaaagtaaatttgcaaaagaatcattaacgtttgatgatgtgttattaattccagcacaatctgatattttaccgaaagacgttgatttaagcgtacaattatcagacaaagttaaattaaatattccagttatttctgctggtatggatactgtaactgaatctaaaatggcgattgctatggctcgtcaaggtggtttaggtgttattcataaaaatatgggcgttgaagaacaagcggacgaagttcaaaaagtaaaacgctcagaaaatggtgtcatttcaaacccatttttcttaacaccagaagaaagtgtttacgaagcggaagcattaatgggtaaataccgtatttcaggtgtaccaattgttgataataaagaagatcgcaatttagtaggtattttaacaaaccgtgacttacgttttattgaagacttctcaattaaaattgtagatgtaatgacgcaagaaaatttaattacagctccagtgaatacaacacttgaagaagcagaaaaaattctccaaaaacataagattgaaaagttaccattagttaaagacggacgtctagaaggtcttattactattaaagatattgaaaaagttatcgaattccctaatgcagcaaaagatgaacatggtcgtctacttgtagccgcagcaatcggtatttcaaaagacactgatattcgtgctcaaaaattagtcgaagcaggtgtggatgtcttagttatcgatacagcacatggtcactctaaaggcgttatcgatcaggtgaaacatattaagaagacttacccagaaatcacattagtagctggtaacgtagcaactgcagaagcaacaaaagatttatttgaagcgggtgcagatattgttaaagttggtattggcccaggttcaatttgtacgacgcgtgttgtagcaggtgttggtgtaccacaaattacagcaatttatgattgtgcaactgaagcacgcaaacatggtaaagctatcattgctgatggtggtattaaattctcaggagatatcattaaagcattagctgctggtggacatgcggttatgttaggtagcttattagcaggtactgaagaaagtccaggcgcaacagaaattttccaaggtagacaatataaagtataccgcggaatgggctctttaggtgcgatggaaaaaggttcaaacgaccgttacttccaagaggacaaagcgcctaagaaatttgttcctgaaggtatcgaaggacgtacggcttataaaggtgcgttacaagatacaatttaccaattaatgggcggtgtgcgtgctggtatgggttatactggttcacacgatttaagagaattacgtgaagaagctcaattcacacgtatgggtccagctggtttagcagaaagccatccacataatattcaaattacgaaagaatcaccgaactactcattctaattaagataaaggagaacgacaaatatggaaatggcaaaagaacaagagttaatccttgtcttagactttggtagccaatacaaccaattaattacacgccgaattcgtgaaatgggcgtttatagtgaattacacgatcatgaaatttcaattgaagaaattaagaaaatgaatccaaaaggtatcatcttatcaggtggtccaaattcagtttatgaagaaggttcatttacaattgatccggaaatatataatttaggaattccagtacttggtatttgttacggcatgcaattaactactaaattattaggtggtaaagttgaacgtgccaatgaacgtgaatacggtaaagcaatcattaatgcgaagtcagatgagttattcgctggcttaccagcagaacaaactgtttggatgagtcattctgataaagttattgaaattccagaaggctttgaagttatcgctgatagcccaagcacagactatgcagcaatcgaagataagaaacgtcgcatttatggtgttcaattccatccagaagtacgtcatacagaatatggtaatgatttattaaataattttgtccgtcgtgtttgtgattgtaaaggtcaatggacaatggaaaactttatcgaaatcgaaattgaaaagattcgtcaacgcgtaggagaccgtcgtgtattatgtgcgatgagtggcggcgtagattcatctgttgtagctgtactattgcataaagcaataggtgatcaactaacatgtatctttgtagaccatggcttacttcgtaaaggtgaaggcgacatggttatggagcaattcggtgaaggtttcaacatgaatattattcgtgttaatgcgaaagatcgctttatgaataaattaaaaggtgtttcagatcctgaacaaaaacgtaaaatcattggtaatgaatttgtatacgtatttgatgatgaagcatcaaaactgaaaggtgtagacttccttgcgcaaggaacactatatacagacgtcatcgaatcaggtactaaaacagcacaaacaatcaaatcacaccacaatgttggtggattaccagaagacatggaattcgaattaatcgaaccaatcaatacattgtttaaagatgaagtacgtaaattaggtattgagttaggtattccagaacatttagtatggagacaaccattcccaggacctggtcttggtattcgtgtacttggagaaattactgaagataaactagaaatcgttagagaatcagacgcgattttacgccaagtgattagagaagaaggtcttgaaagagaaatttggcaatacttcacagtgttaccaaacattcaatcagtaggtgttatgggagactaccgtacgtatgatcacacagtaggtattcgtgcagtaacatctatcgacggcatgacaagtgacttcgcacgcatcgattgggaagtcttacaaaagatttcaagtcgtatcgtaaacgaagtagaccacgtcaaccgcgtagtctatgacattacatcaaaaccaccaagcacaattgagtgggaataattatatatagcaaatgataggctggagttaccgttactatgcggtttccagcctttttggtgtgcttggcatgggcaacatcatgtgatgaaataatgggagtcatctctttcttatattttgagacggagatgatgagaagttagacaaaaatgtagaagaagtatttaacgacaatcctagtcatacaatgattgtagatgatatacgttagaggagtgagagcaaatttatttgttactaagagacaagagttttaaataaatatcttttgtactacataaaagaaagtggtcgttatcatagaatatttggcgataaggtaaatctgattatgttagaacctatatttattgatgatttagtgaggtttgagaagacaagaatgattgaattacaattgacaattgacaccccttagattaatattaatttattagaagtcaactaacgcctcttagcaatgcgaaacacagttggccttttttttgtaataggagaatttatagttatggataaatcacttgaaattaacttaaaagaattagaaagcataatgtataaagaaaaagtaatcgacgttaaagagtatgataatttaaaagtaacttttgagacactaaacgatgctcctaaaagtgaaatacccactccctttacaatagaacaaatgttatataaattagaaactaaaaatttatattttcctgaaattaagtcaaaagaaaaatgtgtggagcttttacatagtgttggctattataatttgaagcattttatgtataatgaatttggtaaagatgagccgaaaaattttgatgaagtatatatactttataaatttgatagatatttattgaaacaattatttagtttagtaaatatgttggaaactcatataagaaatattattttagaagtatatatgttagaaattgagtataataacaagccttcgacactgttctatttagacaaagatttatattttgagaaagttaatgatgagtataaatattctgccaaaaagctaaaagagttcaataggttacaaaatgttttttggagagctatagaaaaaaagaaaagtaacgataacgttaaacataatattaaaaaatacaatattataccagcttgggttttattccaaaattttagttttggagatttgtctactttttatagaactacattaccaacttatagaaataaagtaagtaagcgaattgaaaatttaatagaaaaaaatactggtataagcataaaacttccagaaaagttattgtgtgcatggttgaatagtatcaggtttttgagaaatagaatagctcacacagatataatttatggaattaattttacaaacacctgtgcaaaacatcatagtgatgaggaaatgtatgtaaatatagaaaagtataaatatcagcaaaggttagttacgtttttattagctatgaagaaaatatttatgagtatgccagaaaataatatcattgaatggaatgagactctaactaagatagagaataaatgttcagaacataactttattaaactttctaggttaggagttattgaaaataacctttcttactttaaaataactaaataaaaaatagcgcacactaataactaagtgattgtctttttacgctgaataatgccctgtgttgtagttagaaagattttcaaataacactatatttataaaaatgttgaattataatatggtcggtttattttataggagtaataaaaagcatttatcttttatccgccacaaataatgagtaaatgtaccttgctttcaatgttgatattttacaaccttgtagagttgatttgatatatcatctcacacgttgtaggcaatgaatacgtaaattctgcactgacatgaactgttgagaagtatagagcattaaaaatcttgatatatcaatagttataaactggtacaaattaacgaaaagcactcttgtcattgagtgggaataactatatatagcaaatgataggctggagttaccgtaattacgcggtttccagccttttttggtgttcttaatatgggcaacatcatgttatgaaatgataggagtcatatatgtagaaattggcgtaccaatttctttatgttggggccccgcagtcaactactgccaatataagattgtagagcctacgattttgattttatgtcctcggctgggtttcctacgattagtcaagtacttataatttaaataaacattacttaactaaaccgttcattttaatttttttgaataaggtgttaaactgtatttgattgtacgtttggctaatttggtgacatttgataatcgtacaatttatgattcattaccagataatgaatcgtttcctattcttattaaatagtatttaaaaatctatactatctatattgaaatttttatttatggttatgccataactactttgtatttccggtactaaactttgcaatattgggtaatagttattagcgaagccaataataatggaattaatcacattgatactaagttctttatcttcaggtaatgcattttctattattttgattaagtctatatattttatttcatcagaatttttatgtgctaaatacttcataaaatcagtttgcactttttcgaaaacgctatatcttaagtccatttgtacaaatattaagctgacagttttagtttcgaattgactttgacccaaaactgaagcaagttcttctattgattgatatagtaatctgatatcgccgttatcttcaagcatatgaaacactcctttatcattttagaataaccatgcaatggcttctttgactacagttgagattatcccagcatcacctttacttagaccggcatttattgcgcctcgtttaaccgcatcaccgacagagttagctggtacttctgaccattttagcaatggtttcaattcttttacaatacctgaataccctttatcaaaaatagttgcagctgtcggcggtggactaaccggtggagttacattctgctaatattgttggagtgataccatggaaaaattatttaatagatgggtgtgtttgttcttatttttagtaataatatcatgggtgataattagtataaaatttggtaatatcagcacgacgcaaatattaatttctaatctgtttatatttatcgcttatatactatatttagttaagttcattcgtttcaaaaaaaacagtggcgatcagtaaacaggtataaagaaagtcgattttgtctttctctcgcacatatataagtttatatagatgtagaactaatttttatttgtaaattgttttgtgattggaaatgagtatgaacatgttctccaaacaacagagtatgtcttggaagaaatctattatacttatgtgaataagtcataatgtcagacatacataataagacgaatagattgtaaatagctttttacttctaattgtttaggcggcctttgttggtcgccatttttataaaataatataaacgactaaacctcagcacctattaatttaagagtgaggtcatttttaaaggtgaaaaaggggtgattttatatattaaaatgatatataaaacaagtagtattagtatgttgtgaattgttatagaatttgacttgttagcaatttcgtagctattgtaatagcaagtactgtagggttgtgttttttaaaggtagtgaaatgatattggatttttgaagtggaatatttgtaggtggttacaacgaagcatattagaactacaaaaggaacgatgaaattaaatgtccatcattccttatgcctagtcgttttttagttaatatatttaattgctaacttattattagggtctctttcaagaattttatttgcgaccaattgaatattctcatgtgaaatcatatcaaagtctggttctccaaggatttctaaaaattcgtataataaattaggattattaaattgcgaaatctctaacgattgccaataatgatagtatgctaaatcataggcattatctatgtaattgaaatgaaagtgatagatgcttgcgaccatttcatgatattcaattgtatttatttgattcgcaagatttgataaatatgatactaatttttcatctgaaatttcgttcgacataaagtacgttagaatattctccatatctttattctctaacatattttttaattcagttggtaataaatttaatagaatgttaacgcttttcatttatttaacccatccattcgatatatatatattgccattttttcgtgtataagttatgactacagttctaccactcataacaagtgttttttggtatgcggactttttgtatcggctttgctttccatacctcataacatgcgacattactttagaaacatctttccaattgtttttagtaactttattccaattatgtttactagcaagaatatgttttcttttattagctcctagattggctacagaaggtaaaactttaccaaaactctttgttttgatagcggtttgagttgctttttttccatatgttttaattgcatagtttattccgtatctagctacagcagctaatattactaatggcaatgcagaagatttagcttcaattgagttgaattttattatttcgccagtttctttgtcgataaatgtagcttcatattctgtattttcaaattgctttacgaaaacgtcataatctttatttattatttttccattttcatcgacgtatctgcccttaacatccatggagttagtatttaaatcatattgaatatttgcttttaaatcaatatcttctttagttaattcaattgttggtttcgaattggtacttgttttatcaataatttttacttcattgggattttgtaaattatttttatgtaaatcttcttgtgttatttctttataagaagtctcgcttgcattaacatttctagtttcaatcactcctgtcacagaagtaatggttaatactaagactagtattcgaataaagtttttaagtgtataatttttcatttactatctccatttgtgacttttattttgaaatctttgaaattattagaataagaatttaaggtatatgaatttaatttcttatttgactgcttcattttgataatttcatttgtggttaaagctgtggcgaaagaatttccgctaaataattctctttttccttgattattaatggactctatattttcgcttaaattatatatgtctatttttcctgaagaactatatctcgatattttgaaatctttgcttaaaccaccaacagatataatatttgattttgaagctgggaagtcactttttccgcctaaattgttgccagaagaagcgataacaattgttccattttcaattaatttatctaactttttagaaattttgtaattatatttaggaaacccaaagcttatattcacaatatctacgttgtgtttaatacaccaatcaatagcctgttcaacattagagggtgtactttcgccattattatctaatacttttaaatgatagagatttgctttagtaatgttctggattactaaattactgattgcagtaccgtgattatgactatcttttgtatgtttatcagcagaaaagtttattgttgttatattttgtttgatgtgctcagtattgaccccactatctaaaattgcgacattaatctctttattatttttctcaattgtaaaatataccaatatactacttactaaaataaatgagaaaatccagtttttcaaaattcctcctccttatatataatataaatataacaaattaatgaatttataactatataattttaacatttatgaaattttcattgaacaagagagagtaatattgaagttagttaatatgtaatttgatgaaaaaactaaaaagtgtaataatcattctgacttaaatgaaggctgatgtcttaatattttcaacaaaaagaaacgttgttttaatctaattatcatttcacacgttgcaagtagtaaatacgctagtataaaatgatgtgaatttatgagaaatatagaacattaaaaatcttgatatatcaatagttataaactgatacaaattaaataaaagcactcatgttatcgagtgggaataattataaaataaaactacctgtttacacggatggtttttaatttgagtagtagggataataaaattgaatgtgtgaatttatgtttgttattgcttcttatttacccaaaatataatttaatatattatttacataacgatatagccctcattctatatgcggcatggctatacttttataggaatcaacataaaggatagattaattgaggtgaaccatgagatcagacaatgatattattaatacaattttaagtgttgccaaaaataatgaaaatataagactagtatgtatgaatgggtctagagtcaataataaagttgattatgatcagtaccaagactttgatattgcttatattgttaatgatttaaaagaactaacacataatttgtcctggatcaataaattcggaaacattataatgatgcagttgccagataatcaggatttatatgaaaatcaatcagtcgatagttttcatatcttaatgctatttgatgattataaaagaatagatttgactttaatcactaaaaagtatctatcagagtatttgagtagcgattcattattaaaaattttattagataaagataatgtagttgataataatttttcgccagacgattcaaaatactggttgaaagaaccatatcaaaaattatttgatgaatgtataaacgagttttattgggtttctacatacgtgatgaaaggattatggagaaatcagttactgtatgcttttgaccatttaaatatttgtagggaaatgttacttctaatgcttgcatgggacaaaggacatctattagattataaagtaaattttggtaagaattataagtatttaacaaatcacatgtctaaatctgaagaaaacaatcttatttcaacataccccactttaaatagtagtgagattaaaaaatctttatataaaatgattatattctttgatgatattaccaaatcagttagtgataagtgtggcttaatttacgatggaaagcaatatttagaagtgaaaaagtatataggatttgactatattaattagatttaaaaatagaagaaagaaacttattctaagttctgatttatttataagacggatttaaaatacaagaagctggaaagtctactcctctctataactataaaaaatagctattaaaaatctatcgtcatagatttcttcatagcaaaccttagctaattaaaggtcctgaggaataaattttatcaaataattggaatgaaaaattaaatatgatacgatttcgtcgggatgctaataagggattgtttaatttctgaataaggagttttacaatgtacatgattaaaaattcaagaataataaaaggttcgcttgcttttgctcttgtttctggcgtgattgtatgttcagggttaactagtgagcattcttatgcaaaagaaaataatgtcatgcatgcatctgcaaatagttcaggtgaaatcgttaaattgaatgataataccgctagaattgatttgaaaaaaggtattgattatagtgttgacaaaaatggagtggcaacactaaaagatgtaaagactggtaaaaaggaaattttgccatcaactgcaaaagataaaaatggtaaaaatgttacgttaatttattttgaaaaagacggtaaattaggtttttatgtgcagaaaacacaaaaagaacatggagtagggaaatgcgtttctggtatagcgggtggcgcagtgacaggaggcactactttaggtcttgcaggtgcaggagtaggaacagttactattccagtaattgggacagttagtggaggcgtagttggagctgttggtggtgctgtcggcggtggtctaaccggtggagccacattctgctaatagtgtaggagtgataccatggaaaaattatttaatatatgggtgtgtttgttcttatttttagtaataatatcatgggtgataattagtataaaatttggtaatatcagcacgacgcaaatattaatttcaaatctgtttatatttatcgcttatatactatatttagttaagttcattcgtttcaaaaaaagatgaaaataggttttttgaccaaaacctaattgtgatagcatatgaaaaatgagtagtttatcattttttagtctaatatactacaaaaattttacttatgaagcgaaaataacgtgcaagtaacgtgcaaataaaaaaaacgacctaaatccctttaaaaacaaggattaggtcgtatttatttgatactgaaattgtctaacgaaaataacatgcaagtaacgtgcaaataaaaatcaagagtaatatgatatatattatatgcctaggtaaagtttacgaacctacagatttgaaatattcttcagcaactccgtcttttataattcttgaaataactgaggtttttatttttacgttgttttgaattgtctaaaatagtcatacataatctgtttaaccccttacttaagcttgtaaaatgcggaaataagttttccttttttagttattttttcttggtatattttaaatccacaattattgcaataaaattctttcaaattcttattatcataccaatcaacacaaacatgtcttagtgcagtacgatcataaatttcagaagcaatagataaggcatagtccattacaatttctcctggtatatgctttttgtgtttatcgctcctacctaatttagttattaataatgcttgaaattctccattctttttagcatcagacgagatttttcttttttcgtttttccactaacgtctttttcaagctttatatttacaatttttaagaagaagtatcccattatttcaaggtctgatttatctataattaaatacgtacgtaaggaattttgatcgttcatttttattgctttatgttttaggaaatgtgctattgaagggtttaaagatgtttggaatttcttggtttcttgacttatatagttatgaaagagggggtggtcctttattaaatttctgagatcagaaatgctataaataaagtgattaagattttttgttttcatgtaatttaagaaatggatttgttttttgtgggttatttttaattctattatgaaatggtttgaattttgcagttgcaaatatgatagctgcttcttttgacaaagtaatagaacctttttcttctgataccatgatattcaacccttgtacaattcaatttaagtcttataaaataattttactatacaaaatatattgtgtaaatagtttcttattgttaccaaataatatgtttggaagcgttatgtaatgccaatcaacaccgaagttctcatgtcctctttccttttacgactacatatattgttaataatattgaaataataaactgatagtgataatatttatttaactgatccatgagagtaggaaccccatcatacgggaatttcgaaatcatgggttttttgttttaaaggattgatgcaatagataaagtagccattctaatatatggagtatttatcagctgaaaattaaatcagatatgggttttcttcattaaataatttttctataaggaaacagaggcaacgctactgtcacctctgcttgaaataattaggatgaaatactctgagtctaaagtccacacacaattcgctcaaatcctccaaacctccgactacatctccaaccccccaaacaccaatacttaccaaagcattgatatgagtgccaatactggcaatgtgccttgtttgaaaaagatactaatattgcttgaaaggccaccataaatagcaacgccaatgatatacactaaaatagctgcgcatatttcttttggattactgctgataaacaaaccgtatattagcaaaactccgattaaaccgttatatacgccttggttcttcaaaagtaggttaatatttttgtctttcaatttatcgacgcttatattaaatgtctcgctagtctttttggaagttgtagcaatcgtttcaaggtacataatatagaaaaactctaatgccacaaatatgattaaaattgttgagatgatattcactataacgctcctttattattaaatattttcttgtaaaaatgattgcagtgtctgtggttgatcattgactaattgttggaaatcattggattcttggtctaatagtcctcttgctcctgcgtcgtacattgatgccaataatgcaccaaagcctttaggttcatcgtacatttctgcaaatgtctctaatgaaacgggctcatatttaatttctgtgcctgatgcctcagataaaattgcagcaagttctttcatatcataactgtagcctgataataagtagcgtttgccccaagtatctggatttttaataatagcaatgacacctctagctatatcatttctagtaatataattaatacgaccatcaccagctggataaatcagtttatgcatattcatcaattctggtaaatatggtttaagtggatccatgtacattgccattcttacatacgtatagtcaatgccacttgttgccaatagacgtgctgcataaccaaaataaggactcatatggaatggattattatgctgatctgcgtaataacctatgaaaatgatatgagcaacgccgctctgctttgccgcatatactaaattttccacttcaggaatacgtttgaatgatggatggataatacttggaataaacacaacggtatccattcctttaaatgcttctaccatgctttcttgattaaaataatctaattgtcgaacaggaacttttccgcgccaatcttctggaactttctcaacatttctaacaccaatgtgaaaatgatctatgtgatttgcaatggcttgatttgtaatatgtgtgcctaaatgacctgtagcacctgttaacataatattcattcacttcatctcctaatctttatatacataacataatacttatttgatggttttcaaaacatttgattttataaaaaattctaatctgtatttattgtcgacgtgtatagtaaatacgtaaatattattaatgttgaaaatgccgtaatgacgcgttttagttgatgtgtatcactaatatcattgaaaattttaatcaggtactacgacaatatgatgtctgttttgtgtctgaaagttttacagtttttaaaataaaaatggtataaagtgtgatttgtataaaaaagagtctcgacggataagaattgattaataacagttagcattttattaattaccttaacaatgattcaagtttagttaaatgaggtttaatttgaaaggggatagcgcctcaatataatgtaggtagattgttcatattacgtaattgaaaaatcaaatttaaatagattggggctaaaaattatgaaatttaaagcgatagcaaaagcaagtttagcattgggaatgttagcaacaggtgtaattacatcgaatgtacaatcagtacaagcgaaagcagaagttaaacaacaaagtgaatcagagttaaaacactattataataaaccaattttagagcgtaaaaatgtgactggatttaaatatactgatgagggtaaacactatttagaagtcacagtagggcaacagcattctcgaatcactttacttggatctgataaagataaatttaaagacggagaaaactcaaatatagatgtgtttatccttagagaaggtgacagtagacaagcaacaaattactcaattggtggcgttacaaaatcaaatagtgtgcagtatattgattatatcaatacgccaattttagaaatcaagaaagataatgaagatgtacttaaagatttttactacatttcaaaagaagacatctcattaaaagaacttgattatagattacgagaacgtgcaattaagcaacatggcttgtattcaaatggtcttaaacaaggtcgaattacaattacaatgaaagatggcaaatcacatactatcgatttaagtcaaaaacttgaaaaagaacgtatgggtgattctatcgacggcagacaaatacaaaaaattctagtagaaatgaaataatactttctaataacaaagcgctatgttgaatagtgcttgttatggaaatatatggaagttaagcgacgtactgttgcttagcttctttttttgatgggaaaaacgacctaaaactcacacaaacagtcgcaccacgcattatcttttgcttaaataacttaatcatattttatgaatagttaaaaacaggttaatgtgaatatcagcacacagctcctataatatgggtgtatggttcaagttacgtaataagacaatctaattataatagattggagcatacaactatgaaaatgaaatcaattgcaaaaataagtttgttattaggaatattagcaacaggtgtaagcactacaacggaaaaaccagttcatgccgaaaagaaacctattgtaataagtgaaaatagcaaaaaattaaaagcttattataatcaacctagtattgaatataaaaatgtgacaggttatatcagtttcattcaaccaagtattaaatttatgaatatcatagatggtaattctgttaataatattgctttaattggcaaagataagcaacattatcatacgggtgtacatcgtaatcttaatatattttacgttaatgaggataagagatttgaaggtgcaaagtactctattgggggtatcacgagtgcaaacgataaagctgtcgacctaatagcagaagcaagagttattaaagaagatcatactggtgaatatgattatgactttttcccatttaaaatagataaagaagcgatgtcattgaaagagattgattttaaattaagaaaataccttattgataattatggtctttacggtgaaatgagtacaggaaaaattacagtcaaaaagaaatactatggaaagtatacatttgaattggataaaaagttacaagaagaccgtatgtccgatgttatcaatgtcacagatattgatagaattgaaatcaaagttataaaagcataacacatatacttgatgacgaaataagttgaaattgaaatagagaggttaagtgacgatcaaacgttgcttaacttctttttaatgcttaaaaatcatttcaaaggcacatagaaacgctatattaacctcataatcactcattattttttgcttaaattacttaataatacttcaataattgttaaaaggggtttaatgtgattatcttagaatgccatctataatgatgttgtatgattcaaattacgtaaaaagacaatcgaatataatatagattggagcatacaattatgaaaatgagaacaattgctaaaaccagtttagcactagggcttttaacaacaggcgcaattacagtaacgacgcaatcggtcaaagcagaaaaagtacaatcaactatagttgacaaagtaccaacgcttaaagcagagcgatcagcaatgataaacataacaacaggtgcaaatacaggggcaacgcaagcagctaacacaagacaagaacgcatgcctaaactcgaaaaggcaccaaatactaatgaggaaaaaacttcaatttccaaaatagaaaaaatatcacaacctaaacaagaagcgcagaaatcgcttaatatatccacaacgccagcgcctaaacaagaacattcacaaacgacaaccgaatccacaacgcagcaaactaaagtgacaacacctccatcaacaaacacgccacaaccaatgcaatctactaaatcagacacaccacaatctccaaccataaaacaagcacaaacagatatgactcctaaatatgaagatttaagagcgtattacacgaaaccgagttttgaatttgaaaagcagtttggatttatgctcaaaccatggacgacggttaggtttatgaatgttattccaaataggttcatctataaaatagctttagttggaaaagatgagaaaaaatataaagatggaccttacgataatatcgatgtatttatcgttttagaagacaataaatatcaattaaaaaaatattctgtcggtggcatcacgaagactaatagtaaaaaagttgatcacaaagcagaattaagcgttactaaaaaagataatcaaggtatgatttcacatgatgtttcagaatacatgattactaaggaagagatttccttgaaagagcttgattttaaattgagaaagcaactcattgaaaaacataatctttacggtaacatgggttcaggaacaatcgttattaaaatgaaaaacggtgggaagtatacgtttgaattacacaaaaaactgcaagagcatcgtatggcagatgtcatagaaggtacaaacattgataaaattgaagtgaatataaaataatcatgacgttctctaaatagaagctgtcatcggaaaaacaagaagttaagtgacaacggtttacatgttgcttagcttcttttattatgcgcaatgatgtaaaaaaacgaatattcatttgtttgtaaaagtggcatttctatgtcttaaaagtgacgaaacttcaaatgtgccaagtgttgaatcacatcaaaatcatttttatttaacgaacattatggatttcttaatttacttaacgatgattcaaatatagttaaacaaggtttaatgtgaatggagcaatacgccatctataataaagctgtatgattcaatgaatgtaatcgaacaaatctaataattacgaatggagcatacaactatgaaaataacaatgattgctaaaacaagtttagcactaggccttttaacaacaggtgtaatcacaacgacaacgcaagcagcaaaagcgtcaacaccatcttccactaaagtggaagcaccacaatcaacaccgccctcaactaaagtagaagcaccgcaatcaaaaccaaacgcgacaacaccatcttccactaaagtggaagcaccgcaacaaacagcaaatgcgacaacaccgccttcaactaaagtgacaacacctccatcaacaaacacgccacaaccaatgcaatctactaaatcagacacaccacaatcgccaaccacaaaacaagtaccaacagaaataaatcctaaatttaaagatttaagagcgtattatacgaaaccaagtttagaatttaaaaatgaaattggtattattttaaaaaaatggacgacaataagatttatgaatattgttccagattatttcatatataaaattgctttagttggtaaagacgataaaaaatatggtgaaggagtacataggaatgtcgatgtatttgtcgttttagaagaaaataattacaatctggaaaaatattctgtcggtggtatcacaaagagtaatagtaaaaaagttgatcacaaagcaggagtaagaattactaaggaagataataaaggtataatctctcatgatgtttcagaattcaagattactaaagagcagatttccttgaaagaacttgattttaaattgagaaaacaacttattgaaaaaaataatctgtacggtaacgttggttcaggtaaaattgttattaaaatgaaaaacggtggaaagtacacgtttgaattgcacaaaaaattacaagaaaatcgcatggcagatgtcatagatggcactaatattgataacattgaagtgaatataaaataatcatgacattctctaaatagaagctgtcatcggaaaaacaagaagttaagtgacaacggcctacatgttgcttagcttcttttgttatgttcgatgatttgagaacccgaattttcgatgggtccaaatatgacgtggaagagtcctgaatttatctgtaaatccctatctatcgggtgtggatcacaacggaatcagttttatttaacgaacattatagattccttaatttacttaataatgattcaatgattattaaacatggtttaatgtgaaaggtcaaatacgccaactataataaagctgtatgattcaatagacgtaagcgaacaaatctaataattacgaatggagcatacaactatgaaaatgacagcaattgcgaaagcaagtttagcactaggtattttagcaacaggaacaataacatcaacgcatcaaactgtaaatgcgagtgaacatgaagcaaaatatgaaaatgtgacaaaagatatttttgacttaagagattactatagtggcgcaagtaaggaacttaaaaatgttactggttatcgttatagcaaaggtggcaagcattaccttatctttgataaaaatagaaaattcacaagagtacagatatttggtaaagatattgaaagatttaaagcacgcaaaaatccgggattagacatatttgttgttaaagaagcggaaaaccgtaatggcacagtgttttcatatggtggtgtcactaagaaaaatcaagacgcttattatgattatataaacgcaccaagatttcaaatcaagagagatgaaggtgacggtattgctacgtacggtagagtacactacatttataaagaagagatttcacttaaagaactcgactttaaattgagacagtatttaattcaaaattttgatctgtataaaaagtttcctaaagatagtaagataaaagtgataatgaaagatggcggctattatacgtttgaacttaataaaaaattacaaacaaatcgcatgagtgacgtcattgacggtagaaatattgaaaaaatagaagccaacattagataattcaatgaaatatggataatagtaaaatatggatagtatagaggagttaggcaacataagttgcttagcttcttttttgtgttggagagatgaaaatgaagcgggttcatgatcaaaacttgtggaaatagttgatacttatagatgcgtgatgtcgctttagtgacatgaaacaatgtggaaaacataattaaattgagggaaagtgtgaatagttaaaaaattagcattgtgttataaaaaataattaatactgttaggatttcattaactaacttaacgttggttcaaaaatagttaaaaagaggttaattcatagcgcagtatctcgcttatataatgatagtagattgttcgtattacgtaattgaattaatcatataaaaatatattaagacaaaatttataaatagattgggagaatagtactatgaaattaaaaacgttagctaaagcaacattggcattaggcttattaactactggtgtgattacatcagaaggccaagcagttcaagcaaaagaaaagcaagagagagtacaacatttatatgatattaaagacttacatcgatactactcatcagaaagttttgaattcagtaatattagtggtaaggttgaaaactataacggttctaacgttgtacgctttaaccaagaaaaacaaaatcaccaattattcttattaggaaaagataaagaagaatataaagaaggtattgaaggcaaagatgtctttgtggtaaaagaattaattgatccaaacggtagattatctactgttggtggtgtaacgaagaaaaataaccaatcttctgaaactaatatacatttattagttaataaattggacggaggaaatttagacgctacaaatgactcatttttaattaataaagaagaagtttcactgaaagaacttgatttcaaaattagaaagcaattagttgaaaaatacggtttatatcaaggtacgtctaaatacggtaaaatcactatcatcttgaacggcgggaaaaaggaagtaattgatttaggtgataaattgcaattcgagcgcatgggtgatgtgttgaatagtaaggatattaataaaattgaagtgactttgaaacaaatttaaagtaagtaatcaatgactcgaaagtaataaatttgaagcagcttaacgatgaaatgttgaataaatacgtacatcctccaaaaaggggcgtatctaaatcaacagtgtcgttaggctgtttttatgttttataacgcagggtataagcatactaaaaattcaaattactcctgaaagtgatgtccactgaatattaattagaacttcattaaccatgatttaagtttaattaaacgagtgttaatgtcagtctgtctcaaagccctttataataaatgtgtattattcaaattacgtaataaaagcaatccaatatattaagattggagcacatgaatatgaaatttacagtgatagctaaagcgatatttgtattaggaatattaacaacaagtgcaatgataacagaaaatcaatcggttaatgcaaaaggaaagtatgaaaaaatgaaccgtttatatgatacaaacaagttacatcaatactattcaggacctagttatgagttaacaaatgttagtggccaaagtcaaggttattatgactctaacgttttgctttttaaccaacaaaatcaaaagttccaagtgtttttattgggaaaagatgaaaataaatacaaagaaaaaacgcatggcctcgatgtctttgcggtaccagaattagtagatttagatggaagaatatttagtgttagtggtgtaacaaagaaaaacgtaaaatcaatatttgagtctctaagaacgccaaacttacttgttaaaaaaatagacgataaagacggtttttctattgatgaatttttctttattcaaaaggaagaagtgtcattgaaggaacttgattttaaaataagaaaactgttaattaaaaaatacaaattgtatgaaggggcagctgataaaggtagaattgttattaatatgaaagatgaaaataagtatgaaattgatttaagtgataaattagatttcgagcgtatggcagatgtcattaatagtgaacaaattaaaaacatcgaagtgaatttgaaataatcaatgatatatatagaatgaaagcttaagaagcggtttaataatcccatgtttaatgattttgatacgtgtttttataataaaaacatatcgaacattgactacgttattaagctgcttttttgtacactttgtaacgaataacttaagatttaaaactaatcggaaagaacaatgattcccccaaaaaaaatttatgttgctattaaaaatcagttaatacgaatgttaaaatacgtttgattttcattaataatgattcaagtttatttaaatgagcgttaatgtcagtctgttttgatgcaccttataataaagacagatagttcaaattacgtaatcataacaatccaatatatcaagattggagcaaataaatatgaaatttacagaattagcaaaagcaacattagcattaggaatattaactacaggtgtgtttacagcagaaagtaaagctgttcacgcgaaagtagaacttgatgagacacaacgcaaatattatatcaatatgctacatcaatactattctgaagaaagttttgaaccaacaaacattagtgttaaaagcgaagattactatggatctaacgttttaaactttaaccaacgaaataaagcttttaaagtatttttacttggtgacgataaaaataaatataaagaaaaaacacatggccttgatgtctttgcagtacctgaattaatagatataaaaggtggtatatatagcgttggcggtataacaaagaaaaatgtgagatcagtgtttggatttgtaagtaatccaagtctacaagttaaaaaagttgatgctaaaaatggcttttcgataaacgagttgttttttattcaaaaggaagaagtttcattgaaggaactggactttaaaataagaaaactcttaatcgaaaaatatagattgtataaaggaacgtcagataaaggtagaatcgttattaatatgaaagacgaaaagaagcatgaaattgatttaagtgaaaaattaagttttgatcgtatgtttgatgtaatggatagtaagcaaattaaaaatattgaagtgaatttgaattagttcgagttaatagcataatagcttaagaagcggcttaacgacaaaatgtgaattggcatttgtgtccttatataaggaactgtgttaaatacattactgttgttaagttgtttttgtaattcaaagagcagaacagagtaacatcatcagttgtagtaaacgataatccggtaaaacaactaaatgaaataatgaaagtcatttaacctgaacattaaaatatatttgtttttcattaagaataattcaagtatatttaaatcgaggttaattatcgtatgaaacgatgcacgttataataaaaatgtatgattcaaattacgtaatgaaaacaatccaatatattaagattggagcaaaacaatatgaaattaacagcgatagctaaagctgcattagctttaggaattttaacaacaggaactttaacaacagaagttcattcaggtcatgcaaaacaaaatcaaaagtcagtaaataaacatgacaaggaagcattataccgatactacactggaaagactatggaaatgaaaaatattagtgctttgaaacatggtaaaaataacttgcgttttaagtttagaggtattaagattcaagttttactgcctggaaatgataaaagtaaatttcaacagcgtagttatgaggggttagatgtgttttttgttcaagaaaaaagagataagcacgatatattttatactgttggtggtgtaatacagaataataaaacatctggagttgtcagtgcaccaatattaaatatttcaaaagaaaagggtgaagatgcttttgtgaaaggttacccttattacattaaaaaagaaaaaataacactaaaagagctggattataagttgagaaagcatctaattgaaaaatacggactttataaaacaatctcaaaagatggtagggtcaaaattagcttgaaagatggcagtttttataaccttgatttaagacctaaattaaaatttaaatatatgggggaagtcatagaaagcaaacaaattaaagatattgaagttaacttaaagtaaataattacgaataataaaaagtaattgaagcggcttaacggtgaaatgtaaattggtgcgcatagcttatacaaaaaggatgcatcaatcgatatcgtcgttaagccgtttttgtttgtgtgtcatgaatcctatcccaatctccatgaatataaaaattccaccaccaacatcaaaattctccacatcgcaacataaccaaatgttataataaatctattacacaaagagataaattacttattcaaaggcggaggaatcacatgtctattactgaaaaacaacgtcagcaacaagctgaattacataaaaaattatggtcgattgcgaatgatttaagagggaatatggatgcgagtgaattccgtaattacatattaggcttgattttctatcgcttcttatctgaaaaagcggaacaagaatattcagatgccttggcaggtgaagacatcacgtatcaagaagcatgggcagacgaagaataccgtgaagacttaaaagcagaattaattgatcaagtcggttacttcattgagccacaagatttattcagtgcgatgattcgtgaaattgaaacgcaagatttcgatatcgaacatctcgcaacggcgattcgtaaagttgaaacatcaacactaggtgaagaaagtgaaaatgactttatcggactgttcagcgatatggacttaagttcaacgcgactaggtaacaatgtcaaagaacgtactgctttaatctctaaagtcatggttaatcttgacgacttaccattcgttcacagtgacatggaaattgatatgttaggtgatgcatacgaatttcttatcgggcgctttgcggcgacagcgggtaaaaaagcaggcgagttctatacaccacaacaagtatctaagatactggcgaagattgtcacagacggtaaagataaattacgtcacgtgtatgacccaacatgtggttcaggttcattactgttacgtgttggtaaagagacacaagtgtatcgttatttcggacaagaacgtaacaatactacatacaacttggcgcgtatgaacatgttgttacatgatgtgcgctatgagaacttcgatatccgcaatgatgacacgttggaaaatccagcctttttaggcaatacatttgatgcggttattgcgaacccaccatatagtgcgaaatggacagctgattcaaagtttgaaaatgacgaacgctttagtggttacggcaagcttgcgccaaaatccaaagcagactttgcctttattcaacacatggtacattacctagacgatgaaggtaccatggcagttgtactaccgcatggtgtattattccgaggtgctgccgaaggtgtcattcgtcgttatttaatagaagaaaagaactacttagaagccgtgattggtttgccagcgaatattttctatgggacaagtattccaacatgtatcttagtatttaaaaaatgtcgccaacaagacgacaatgtattatttatcgatgcatccaatgattttgaaaaaggaaaaaatcaaaaccatttaagcgatgcccaagtcgaacgtattatagacacatataagcgtaaagaaacgattgataaatatagctacagcgcgacattacaagagatcgccgataacgattacaacttaaacataccgcgatatgttgatacattcgaagaagaagcaccgattgatttagatcaagtccaacaagatttgaaaaatatcgacaaagaaatcgcagaagttgaacaagaaatcaatgcatacctgaaagaacttggggtgttgaaagatgagtaatacacaaaagaaaaatgtgccagagttgagattcccagggtttgaaggcgaatgggaagagaagaagttgggggaagtagccaaaatatatgatggtactcatcaaactcctaaatatacaaacgaaggtataaaatttttgtcagtagaaaatataaaaacgttgaattcaagcaagtatatttcagaagaagcatttgaaaaagagtttaaaatccgaccagaattcggagatatattaatgactcgaattggtgatataggtacaccaaacatagtgagttcaaatgaaaaatttgcttactatgttagcttagcattattaaaaactaagaatcttaattcctattttttgaaaaatttaattttatcatcatctatccagaatgaactatggagaaaaactttacatgtggcatttcccaaaaaaataaacaaaaatgaaattggaaaaattaaaattaattaccctaaaaagcaagaacaacaaaaaattggtcagttcttcagcaaactcgaccgacaaattgaattagaagaacaaaaactcgaattacttcaacaacagaaaaaaggctatatgcagaaaattttctcacaggaactgagatttaaagatgagaatggtaatgattatccggagtgggaagagagaagatttgctgatatatttaaatttcataataaactaagaaagccaattaaagaaaatttaagagtaaagggttcttatccatattatggtgctacaggtattattgattacgttgacgactttatatttgacgggaattatttacttattggagaagatggtgcaaatattatcactagaagtgcacccctagtgtacttagtaaatggaaagttttgggtaaataatcatgctcatatattatctcctttaaatggaaatatacagtacttgtatcaagttgcagaattagttaattatgaaaaatacaatactggaactgctcagcctaaattaaacattcaaaatttaaaaattattagtgttgtaatttcaacgaatttagaagaacaacaaaaaatcggaagctttttaagtaaacttgatcgtcaaatcgatttagaagaacaaaaactcgaattacttcaacaacgaaaaaaagccttacttaaattgatgtttgtttaaatctgtaagagtttattttataggaaatggtgatgttttattactcgattaataagtgatttttaattatttaagctacaaaattaaagtaaatcaaaagcgaacattaaatttagacactgtgaaagcgcagtgtcttttttgtgtcgaaattgtgtacagaataagtggttaaataaagattaagttgagataaagtgttattcgtaaataaaagagagtagattgataggaattgaatgatattagttaactatttattaaattacttaataatgattaatttttagttaaagtaagtttaatgtgaagcacgaccattgctcattataatgaatgaggattgttcgtattgcgtaatagaataaatcaaatagactaaaaattgggagcatagaattatgaaattaaaaaatattgctaaagcaagtttagcactagggattttaacaacagggatgattacaactactgctcagccagtaaaagcaagtacattagaggctagatcacaagcgactcaagatttaaaagattattataatagaccttattttgacttaagaaatctaagtggttatagagaaggaaatacagttacatttataaatcattaccagcaaacggatgtaaaattagaaggcaaagataaagacaaaattaaagatggaaataatgataatttagatgtgtttgtcgttcgtgaaggatttggtagacaagcagataataattcaataggtggaattacaaagacaaatgggactcaacataaagatactgttcaaaacgttaatttgttagtttataagagtacaggtcaaaacactacttctgtgacttcaacaaactatagcatctataaagaggaaatttcattaaaagaacttgatttcaaattaagaaagcacttaattgacaataacggtttatataatactgagcctaaagatagcaaaataaaagtgactatgcaaaatggtgatttttatacttttgaattgaataaaaagttacaaacacaccgtatgggtgatgtgattgatggtactaaaataaaagaaattaatgttgaattaaactaaaaattcgagggagcatattatgagggaaaattttaagttacgtaaaataaaagtcggtttagtatctgttgcaattactatgttgtatataatgacaaacggacaagcagaagcatcagaaaaagaaaataacaaccagcaagaaagtaatgaaaaagctcatacagaaaaaaataatgcacaggttaaaaatactgatgttaaaaccgcaactgacaagccagctaattttgtaaatttggaagaagttaagccaggtgatacgtcaatcaaaggtaaaacattaccaaatcatataattttattgaatatagacagacaaagtgccgattcatttgaaggctctgatggagagcttgttatgtcagatgataaaggtaacttcaattatgatttaaaagaccgtaaaatagtccataatcaagaagttgaagtttcatcatcatctttagatgatttaggtgatgaagaggaagaggttgaagaaaaagaagaagttcaagaagaggaaacaggtgctaaatctactgtcaaaacaccaaggtatgaaaaagcatataaagttccaaatcagcaattaaaacaagaaaatggacatcatcaagtattagttgaaccaattaccgcaggatctggtatcattaaaggtcatacttcggtaaaaggaaaagttgctctttcaattaataataaatttattaatcttggtgatagtactgatgttgaaaatcgtttaactgaagaccaaggaaaaactaggtatcaaggtatttggaaacatatagatgataaaggttattttgaatttgatttcaaacgtaaaccatatgataacttaaaattgaatccagatgataatgtgtcattaacattcttgccaaacgatgaagaagaggctttaaagccaattatatttaaaacaaaagtaacaagttttgataatattgaatctgctataactagctataatcctaaaaatgtcaataaagtaacaactcttactaatgtaaaagaagacttagtagttgaagatatttatggctttgaatataaaagtgaacaaggaagaggaattcctcaaaataatagccatagtactaaagaaattaaaggtaaaacaaaatttgcgaatgcagttgtaaaagttgattctgaattaggtgaaggtcaagaattcccagatttacaagttaatgaaaaaggtgaattcacattcaattcatatgatgctggttatagattatacaatggagaaactttaaactttgttattgtagatcctattactggtgttcagttgagtcaaggatttgtgagcaaatatatagatgtttatgaatcgcctgagcaaaagaaagagcgcgaatttgatgaaaaacttgaaagtactccagcttattaccaattacatggggataaaataataggttttgatactgaggggggtgtatcaacttggtttgatgcacttgataagaaagaactggaaaaggttcttcgtcaatattaataaaataaaacagcttaatgatacgatgaaaccagtgacttaatcactgacttcaacgtcattgagctgtttttttatgtgctttgttacaaagcattattgaatttattttacgtgttcatattttgaaacatcaaagccgtcttgcttagctttgttgataatgtctttgattgaatgtagtcctttatcggcgaagtatgatcttaagttgtcttttgtagcttggtcagcattcttatctaataacacatcgatatagcttaattcatgttctaagaagtttgcatcatcatgtagtacgagtccattttgagaataaactttcgcatctgcttgattaccatatccaacaacgccagttgctaatacacctaccattgccgtagctactaaaacctttttaaatttcatatctatcactcctctaaaaattgtaactctatcataacactgaatattaagaaaattacgtttattaagtcgatttaataatttttaataaatagttaaagtggcaaatattgctaaaaagcaattaatctttagtgcgatgcttgtgttccttagtattgagtagtagatttcgaagatattttaattcaaatgaaacaataataaaaaaatgatgcaacataataataagtacaaatttaattaataaattaaattgattgtatatgtatattttggtaacgtaaaagagaaatatacaaaataattaattatttatatgaaaagagaatataaatgaagtataaaacagagagacgtgaagcgatgggatatttaaaaaggtttgcattgtacataagcgttatgattttaatatttgcgatagcaggttgtggcaaaggtaatgaaacaaaagaagattcaaaagaaatacaaatcaaaaagagctttgcgaaaacgttagatatgtacccaattaagaatctcgaggacttatatgacaaagaaggatatcgagatggagaatttaaaaagggagacaaagggaagtggacgatatatacagatttcgccaaaagtaataaaccgggtgtattagataatgaaggtatgattttaaatttggatagaaatacacgtacggccaagggatattattttgtagatactatatatgacaatcatgaaaactcttatagtaaaaattatagagttgagatgaaaaacaataaaattattttattagacaaggtggaagatcaaaaacttaaagaaagaatagaaaactttaaatttttcggacaatatgccgatttcaagagtttgaaaagttacaacaatggcgacgtttcaattaatagtaatgttccaagttatgacgcgaaatttaaaatgagtaataaagatgaaaatgttaagcaattaagaagtcgttataacattcctactgaaaaagctccaatattaaaaatgcatattgatggggacttaaaaggcagttccgttggatataaaaagttagaaatagacttttcaaaagaagaaaatagcgaattatcagtagtcgattcattaaattttcagcctgccaaaaaaaataaagatgatgaatgatagggaggatgtgaaacaatgtggtcaataaaaagaattggaatgtacacaaatgttataattttgagcgtttttataataggttgtgatagttcaagcaataatgcagaaaatcaaagagaagactcaaaagaagaacaaatcaaaaagagctttgcgaaaacgttagatatgtacccaatcaaaaatcttgaagatttatatgacaaagaaggatatcgagatggagaatttaaaaagggagacaaagggacgtgggttgttagatctgaaatgataattcaaccaaaaggtaaaagtttaacttcaagaggcatgatattatacatgaatagaaatactaggaccacaaccggttatttttctatagaagaaatagattcaagaaaaagccttgatgaaagagaaacagaaaaaaagtatcctgtgaaaatgataaacaataaaattattccaactgaggagataaaagatgaaaagttgaaaaaggaaattgaaaactttaagttttttgtgcaatatggcagttttaaaggaatagagaattatgaaaatggtgacatttcctataattctgaagctcctatttattcagcgaaatataaactgaaaaatgatgattataatgttaaagaattacgaaaaagatataatattccaacagaaaaggcgcctaaattgttgttgaaaggttcgggggatttgaaagggtcttcagttggatataaggaaattgaatttatattcatagaaaataaaaagaaaatatatatttttcagatggattaaacttaattccaagtgactaaaaataacacaaaggttgatagtactcaacaaatattaacatgatagagagaagtgaaaaaatgagggattcaaaaagagtagtattgtacataagcattatggtgttgagtatttttataattggttgtaatagttcaagcgagaatgcaaaaaaatcaaaagaagactcaaaagaagactcaaaagaagaccaaattaaaaagagctttgcgaaaacattagatatttacccaatcaaaaatcttgaagatttatatgacaaagaaggatatcgagatggcgaatttgaaaaaggtgataaggggacgtggacgatatatacagattttgccaaaagtaataaagcgggtgaattggatagtgaaggtatggtattacatttgaatagaaatacgcggacggctaaaggatattactttgtaagaaaaacttataacgaagaggataagatgccgcaaaggaaagattatcgtattgaactaaaaaataataaaatagtccttttagataaagtagaagatgaaaaactcaaacataaaatagaaaattttaaattttttgggcaatatgcagattttaaagacttgaaaaattatcaaaacgggaaaatatcgagcaatgaaaatgtgccattttatgaagcagagtacaaaatgggaaatagtgatagtaatgtaaaaaaacttagagatgtttatcctatcacaaccagtgaatcgccaactttaaaatttcatatagatggggatataaaaggtagctcgataggatataaaaaagtggaatatatcttttcaaagcaaaaagataaccaaatttctgtcagtgattttttaaattttaacccatcaaaagataatcagtagagattcaataaaaaatcagacaagaaagatgtggaataatgagaaatttaaagagagacgtattgtacataagcattatggctttgagtatttttataataggctgtgataaatctagtgttactgctgaaaaagcaaaagaagactcaaaagaagaccaaatcaaaaagagctttgcgaaaacgttagatatgtatcctattaagaatctcgaggatttatacgacaaagaaggatatcgagatggtgagtttgaaaaaggcgataaagggacttggacgatgtatacagatttcgccaaaagtaataaaccgggtgagctaagtaatgaaggcatgttcttgagcttagatagaaacacacgtacagctaaggggtactactttgtcaggacgttttatcgcaagtataaattaccttatagaaaaaattataaagttaaaatgaaaaataataaaatcattttattggataaagtagaagataaaaagcttaaacaaaaaatagaaaattttaagttttttggacaatatgcaaatcttaaagaattgaaaaactacagcaatggtgatgtctcaattaatgagaatgttccaagttatgacgtgaaatataaaatgaataataaagatgaaaatgttaagcaattaagaagtcgttataatattcctactgataaatcaccggtattaaaaatgcatattgatggtaatttgaaaggaagttccgttggagataggaagttagaaattgatttttcaaaacgcgaaaatagccatttatcagtaatagattctttggattaccagccagcgaaaactaataaagatgacaaatgataaggatggtgtgaaacaatgaggtctataaaaaggatcagattgtgcataatcctgttgattctaatcatttttgtaacatcttgcgatggtgataataagattactggagattcgaaagaaacacaaatcaaaaagagttttgcgaaaacattagaaatgtacccaattaagaatctcgaggatttatacgataaagaaggatgccgtgatggtgaatttaaaaagggcgacaaaggtacatggacaatatcaacagattttgctaaaagcaacaaacaaggtgaaatgaatagcgaaggtatggtactacattttaatagaaatacgagaacagcaacaggatattatactgtaagaacaacttatgatgaagtggataagttgacacgcgaaaaaaaatatcgtgttgaatttaaaaacaataagatagttctattggacaaagtagaagatgaaaatcttaaacaaaaaatagaaaattttaaatttttcgggcaatatgccgattttaaagacttgaaaaattataaaaatggaagaatatctagcaatgaaaatgttccttattatgaagcagagtacaaaaggaataatagtgatggaaatgtaaaaaaacttagagaaaagtacccaattacaaccaagcagtctccaatattaaaactgcatatagacggcgatattaaaggtagctcagttggatataaacagatagaatacacattttctaaggagaaagatgatgagacttttatgagtgattttttgaacttcggtccatcacacagtaaatagtaaataaaaccaagggcataaactaatttaaaacaagagagaagtgaaaagatgggatattttaaaagagttgtactttacataattgttatggttgtgagtgtttttataataggttgcaataaatcaagcgatacttcagaaaagccaaaagaagattcaaaagaaacacaaatcaaaaagagctttgcgaaaacgttagatatgtatccaattaagaatctcgaggacttatatgataaagaaggataccgtgatggcgaatttaaaaagggtgacaaaggaatgtggactatatatacagattttgctaaaagtaataaacaaggtggattgagtaatgaaggtatggtcttatacttagatagaaatacacggactgcaaagggacattattttgttaagacattctataataagggcaaattcccagatagaaaaaattataaagttgaaatgaaaaataataaaattatcttattagataaagtagaagatataaatctaaaaaagagaatagaaaactttaaattttttggacaatatgcaaatcttaaagaattgaaaaattacagcaatggtgatgtctcaattaatgagaatgttccaagttatgacgcaaaatttaaaatgagcaataaagatgaaaatgttaagcaattaagaagtcgttataatattcctactgataaagcaccggtattaaaaatgcatattgatggtgatttgaaaggaagttctgtgggttataaaaagttggaaattgacttttcaaaaggtgaaaaaagcgatttgtcagtaatagattctttaaatttccagccggcgaaggtggatgaagatgatgaatgatgaggatggtgtgtaacaatgaagtctataaaaaggattggattgtgcataagtctgttgattttaatcatttttgcaacatcttgtggtagtaataagattactggagactcaaaagaagaacaaatcaaaaagagttttgcgaaatctttagacaagtatcctactgaaaatctagaagagttttatgataaagaaggatatagagatggagaatttgaaaaagatgataaagggacttggctaattagatctgaaatgaaaatccaattaaaaggagaaaatctggaatctaggggagcagttatagaaattaacagaaatactagaacggctaaagggaattatattgttagagaagttgttgaagatagcgatggaatgacacacaatcatacaaaaaggtatcctgtgaaaatggaaaataataaaatgattccattaaaatcaattgatgatgaaaaagtaaaaaagaaattgaagaatttaaattctttgtacaatacgggaatttcaaagaattggaaaactataaagaggacgaagtgtcatataacccagaagtaccaatatactctgcacaatatcaattgaaaaacagtgattataatgtagaacaattacgtaagcgatataatatcccgacgcaaaaagcgcccaaattattattgaaaggctcaggtaatttaaaaggttcatcagtcggatataaaaatattgaatttacctttgttgaaaataaggaagaaaatatttacttcacagatagtgtctactttaatccaagcgaggataaataagtataattattattataaaaaatgacgttagaacatttaataataaagttaaatgaattacatgtattaaattgaataagttagttttgtttgataacataaaagttgaataatcactattttaataagttatatgaaatattcaaatgtttataaaattaaagcagagagatgtgaaatgatggagtatataaaaaaaattgctttgtacatgagtgtattacttttaatcatttttattgggggatgtggaaatatgaaagaagaacagaaaaaagaagcaaatacaaataaaacagattcaaaagaagaaaaaatcaaaaagagttttgcgaaaacgttagatatgtatccaattaagaatctcgaggaactatatgacaaagaaggctatcgagatggcgaatttgaaaaaggtgacaaagggatgtggacgatatatacagatttcgccaaaagtaataaaccgggtgaactaagtaatgaaggcatggtcttgtacttagatagaaacacacgcacagctaaggggtactactttgtcaggacgttttatcgcaaggataaattacctgatagaaaaaattataaagttgaaatgaaaaataataaaattatcttattagacaaggtagaagatccaaatctaaaaaagagaatagaaaactttaaatttttcggacaatatgcaaatcttaaagaattgaaaaactacagcaatggtgatgtctcaattaatgagaatgttccaagttatgacgtgaaatataaaatgagtaataaagatgaaaatgttaagcaattaagaagtcgttataatattcctactgataaatcaccggtattaaaaatgcatattgatggtaatttgaaaggaagttccgttggagataggaagttagaaattgatttttcgaaacgtgaaaatagccatttatcagtaatagattctttggattaccagccagcgaaggtggatgaagatgaaagataaatacaaaatagatccagggattattaaaaataatacagaggaaactacagctatttctaaaatcagctacgaagttgaaaatgcgaatttatatggagctgatagtgaagatataacaagacaaatagaatatttgaaagccaaaaaaaaattcccttctaatcttgaatatgttgatagttacactgattctcttaatggagtaacaacttctgcttttttaaataaagatacaggcaaagtaactcttgggatgactgggactaatatacaaggcgaagcctttaaaaagttaaaagaaggtgaattttcaagacaaaatgttaccaatgctttggaaacagttaaagatggatatgcagatcttaaaatattatattctcctgcatctgatcaaaactatagatatgcgaatacacaagaatttataaataaaataaaaagtaagtatgacattgattttattactggtcattcactaggtggaagagatgcggtagttcttggaatgagtaatggtattccgaacattgtggtttataatccagctcctatttctataaatagtttgaatcctaattccccagatggaaaacgattgttagagttatataaaaattataaaggtaatattactaggtttgttgcagaaaatgatgcattgacagaaaatctgaagaaatataagcattatgtttttttcggtaatgataaagtctttaaaaatggtaaaggtcatgaaatggaaggctttctgaccgaagaagaacaaaaagctataaaaaaagaacttaaaaaactacaaggttatgcagaagaaaataataagtcatttgtaaagaattcaaataatgctatctctaaattagctagtatagaattacttagagcaaatatgatgactacaaatggaggaggattatcttcttcgcagcaaaaagttttagaaagtttaacagctttaacaattgcgcagtcattcagtcaactgatagacgatgaaattaatcaaatcaaaaaaatgtataatgaaaagaaaaagaaatttggaaaaaattgggaagacgctcaaaaagctggaaaagctgtaggtgaagatttgagtgtaaatggagttctcaatgctttagatgaaggtcaagtgaatgaaagtagtatggtaagagaacctgaacaaatgatatctgcaaaagaaagacaactttcaacgatagggtcttctgtatcaaattatattatgagagttagactcagtattaatgaaatcgttgataaagatcaagtgcttgcatcacaaataggtggattactatgatgtttaatcaaattaataataaaaatgaattagaagaatcatatgaatctgagaaaaaacgtatagagaatgaactgcaaaatttaaatgaacttaggcatagaactcgaaaagaaaatgaacgtagttatgatgtttttcaatatttgaagcacgaaatgaattatagtgaagatgcccaaaggaaaatgacgagaaatatagaagcgtatgagcaagaaatcaatgagataattagaaagcaagaatggaaattagaagaatataaagaagacttaaaaaagtcttatgaaaagcagttagataaactaagtgactgataatttggaggagattaaatgactctaatagaaccagatatgaacttaagaatgccagatataagtactacagtagaaacacttaatctcatatctaaaatggaagcgcaaaaagaaaatattcgcacagttattgcacctgaacataagcataaatataaagatattgaaaatgggttaaaaggtgaagaaaaagtattaattgaacaaatggcgcagcattgcgaagcttttaaagctaattttaaaggcgcagctcaaggagattgggttaaaagtgctatgtctgagattgacagcattaaggatgacctgaaaaaaattaatagctaaactacatatcatactactaaataaagcgaccaatgttcagtatattcacaactgacactaggccgcttctttttaatttattttatttccatgtaaagtaacgctctcttaatcgaaataccacactcacaattgtaaaaacacaacttaaattactgtcccgcattaaacatatctacattccaaacagcaacaacaaaatcctcaagtaccaaaagctatgaccactttatcaaaatcaacgcaagttaacctctcccgaactacccgctatagatcatcatcaccttacaaaccataaagcgctgcagttaagtattgaatagcatagccaattgaaatgaaaatagcaatcgttataatggcactaccaattgtatataaagtatgtttcgtagataaaccttccgtcttagaaccaaaaacacttagtagaataaatgcaatgccaatgacatataaaactaaaatgacaaataacatgtttatacacctcgattctctttagtgagatatatctttgtctccattataaagtaaagtgctcaataatttaattaagtatactatttttttattatcgaagattgcgaaagaggaaacgctcctatataatgtaaaacgtaattattcctatttacaaataaattgaagtgagggtatatatatggctaaaattccagttacggtattaagtggttatttaggctcggggaagacaacgttgttaaatcatattttacaaaatcgagaaggtcgacgtatcgcggtaattgtaaatgatatgagtgaagtaaatatcgataaagatcttgtcgcagatggtgggggactatcgcgtacagatgaaaaattagtcgaactctctaatggttgtatctgttgtacacttagagatgatttattaaaagaagttgagcgtttagtgaaaaaaggtggcatcgatcaaattgttattgagtcaacagggatttcagagccagtacctgttgcacaaactttcacatatattgatgatgaacttggcattgatcttacagcgatttgccgtttagatacaatggttacagttgtagatgctaaccgtttcgtccatgacatcaactcagaagatttattgatggatcgtgatcaaagcgttgatgaaacagatgaacgttcgattgcggatttattaattgaccaagttgaattttgtgacgtattgattattaataaaattgatttaataagtgaagaagaacttgcaaagttagaaaaagtgttaagtgcattgcaacctactgctaaaattattaagacaacaaattctgaagtagatttaaaagaagtcttaaatacgcagcgttttgattttgaaaaagcgagcgagtcagcaggatggatcaaagaacttgagtctggtgggcatgcatcgcatacacctgaaacagaagaatatggtatatcatcgtttgtatataaacgtcgacttcctttccatgctaaaaggttcaatgattggttagaaaccatgccaaataatgtcgttcgatcaaaaggtatcgtatggctagcacaatacaatcacgtagcatgtttattatctcaagcagggtcatcttgcaatattcatccagttacatattgggtggctagtatgtctgaagcgcaacaaacgcaaatattagcagaacgccaagacgtcgcagctgaatgggatccagaatatggcgatcgtcatacacaatttgtcattattggtaccgacttagatgaagaaaaattaacaaaagaactcgatgcatgcttagtcaatgcgcaagaaattgatgcagattggcaacaatttgaagatccatatcaatggcaaattagaccagcacgataagttgaatgaagtataatcatttttaaattgtggcttaattgtttgcaatttatgacaattaataaaaagttaagatgttcttaggatctttttgttttcaatctatctaaagtgtgatagttttgataaagcagaaatttgcattttatccatagggctaggacatgtatgtgtcttagtcctttttatgtttgctttgatgaaaaatgataatcatcaaatgaaggtacaatcattgtttaacggtcataaaaatgagtggagtaaatgtagctatcaatgtactattaccgcttacggtcacacgagtgtttcagtctaaacgtgcaacgcaattctgcacgtggccaatatatcttgcgctagatcaagaagatcatgaagatttcgcatgccaattcatgaatgtctcagacctcgagtatcaaacataaaacacgccacaaaaatataacgcgtcagactacaaagatcacgaatattccgtacgtcccaccaagaacatcctatacaaaaaataccaagaccatttatttgcaacaaactaacaagactcacctcacatcaataaatcaacacaaagcaaagccaccatccctattggtatagtggcctgagaattttaagtattcaattcgcttaaattattttgcgaaaatgtcgataattgctttgatgattttaatgatagtacctacaatagccatcgttttgtcctcctgtatgttgatttaacatagtgatgagttgttgatcgttaatgtttgagattagttgttacctaaaaatttaccaagtaaatctttaaagaatttgaataattttgctacgaattccatgtgaatggcccccttcaaataagatgttcatatctatgagatttttaaaacttacttaccagtgaatttctcaattaatcctttaatgaatttaatgattcctgcaatgatacccatgtgaaagacctcctttgtttgttatgaaatcttatttaccagtgaattgttcgattaagcttttgataactttaatgatgccagcgatgatacccattaagattacctcctttgcttatgagttaacttcattgtacatagttatcttgtgcgtaattgatttttttcctaacttgaattgttatgatcataactgcgaattttttattttaaaaggacgggaaatactgcctaactgtacaggtgcatttacaaaatctttacaatcattggtttaatagaggttaagctcatgaatttgacatgaagcagaaatttaattatattttatgttataagtttaaaacgaataacacgttaggtctcgtctaggcaaagcatatttatgaagatgaattgaacagacagaagtaacattttatatacatatgtgcatgggagcacgcttaaagagaacactgcaacaaggtatatcaacgtaccgtgatgcagtgtctagttaaactgaaacctgcaatagtaaattttctgccattatgtacagaatctactattgtaggtttttatttttatacataagcaattatgcgagagattagaaataaggaggttatgcagtgttaagttttcaattgctattttcactgtttgttattgcgcttatcattgcattgataagtggcttgttgtttttagcaccagttatgccaatgagatatattaaattacatttatacatactagtcatgccagtattatttgcagtcattggctttttcggtattcatggtcaacatgtcttaggcccatttaaaatagatcgtttatcttggttattagctggctttgtaatggcgcttggctttattattcaaaagttttcaatgcgatatttactaggtgatcatcattatagacattactttccattgttcactgcgattacgtcgtttgcatctttagcatggatgtctgaagacttaagactgatggcactctgctggggtatgacattattatgtttaacattgctgatgaacgttaatcgtttttggaaagtgccacgtgagtctgcgaaattatcaagtatgacatttttatgtggttggcttgcattcgttggagcaattgtaactatttatattgcgactggcgagtggcgcgtgcctcaacatatgtctaattcgacatggtcattgttgacgaatgtactacttgtattagctgtcatgataccggcagcacaatttccttttcatcgatggttgattgaatctgtaacggcaccaacgccagtatcggcaattatgcatgcaggaattgtgaatgcaggtggtgttattctaactcgttttgcgccgatatttgataatggatttgcgttatcattattacttatcctttctagtatttctgtattgttaggatcgggtattagcttagttcaagttgactataaacgccaattagtgggctctacgatgagtcaaatgggctttatgttagttcagtgtgcgctaggtgtctattcagcagcgattattcatttaatattgcacggtatttttaaagcaacattatttttacaatcaggttctatcgtgaagcgattcaatattccaaaacaagcatctgctaaagacgcttatggctggattgtcatgggacgtgtattagctattatcgtggcatttctgttttggatgagtagtgacagaagtgcatatgaagtgttaagtgcactcattctagcatggtcattacttgtatcttggaatcaaatggtagcctttagtaaagggcgtatggcacgtctggttggcatgattttgatttcaattgtgacatttatctacatcatcacacataattatttttacgatgtattacaaaatataacaacatatgcgacaacaccgcctacaattagtgtcatcattagtgttgtcatattaatatttggtagtttattaagtatctgggtagcgcgtcatcgatactctaagacttttgcggtattgtacgtgtggttagttaatctaggtgaagcacgctcgaaagcaatagaaagtcatccgaattatttgaagaagtatttataggaggtgaaaggtatgacaacacagttaaatatcaattcagtcattgaaaatgcgaaacgtgttattacaccattatcaccgatttcgatttttgcagcacgtaacccctgggaaggattagaagcggatacgtttgaagatgtcgcaaaatggttacgtgacgttcgcgatgtggatattttcccaaataaagcattaatagaaagtgctgtggcacgtggtgaattagatgaaagtgtctttaatcaacttgttactgatatgttacttgaacatcactacaatatcccgcaacactacatcaatctttatattgataacattaaaacattaaaagacgtacctgcatcatatatgaatcattcaaatgttgatgttgttgctgatctactattagaaaaatcaaaacgtgatatggctgaatcatatcatcactatgatgtacgtccgatgagtgatgcaataatagatgaacaaggtgagccacttagcgaacaagtgaatcgtcaaatgattaaatggacgaaactttatatcgatcaatttctatcgagttggacaatgccgaagcgtgagcaaagtttttaccatgcatggttgcatttagcgcaacatgaccatagttttactaaagcacagcgccaagtgattaaaggcttacccaatgatcctgaaatgacgatagagtcagtattaacttatttttcaatagatcaggaagactaccaagcttatgttgaaggacatcttttggcgttaccgggttgggcaggtatgttgtattaccgttcacaacagcatcactttgaacaacatttgttaacggattatttggcaattcggttagttgtcgaacaattgctagttggtgatgagtttaagtcagtcactaaagactgtgaaagtagatcggaaaattggtttaagcaaactgttgcatcatggtgttactacagtgatatgcctagcgatgtattactacaacatgacgtcaatgaaattcaaacgtttattcattttgcagcaactatgaataaaaatgtatttaaaaatttatggctaattgcctgggaaatgacatacgaatctcagttaaaacaaaaaattaaagcaggtcatgagagtgtggcgggcgcattagatgtaaaccaagtaaatgtctcagaaaatgataacgctaatcagccacattcagtattgttaaatgacacacaagcagttgatgaaaataatagcgagctaaatcagatgggcacatcaacgaaagcgcaaattgcattttgtatagatgttcgttcagaaccatttcgtagacatatcgaagcagcagggccctttgaaacgattggtattgcaggtttctttggattacctattcaaaaagatgccgtaggcgaacaattcaaacatgattcattacctgtcatggtaccgccggcatatcgcattaaagaatttgcagaccgctacgatatgaatgtttatcgacaacagcaacagacaatgtcatcgatgttttacacatttaaattgatgaaaaataatgtcatgcctagtctgttattgcctgaattaagtgggccatttttaagcttgagtaccattgtcaattcgattatgcctagaaaaagtcgcgcgtctttacaaaaaataaaacaaaaatggttgaaaaagcctgaaacaaagttaacgattgatcgtgagtttgaccgaacatcagacttacctgttggatttactgagcaagagcaaattgatttcgcgttacaagcgttgaaattgatggatttaaccgaagcatttgcgccgttcgttgtgttagcaggtcatgctagtcattctcacaataatccacatcatgcatcacttgaatgtggggcttgtggtggcgcatcaagcggttttaatgctaagttattagcgatgatatgtaatcgtccaaatgtcagacaaggattaaaacaatcaggtgtgtatattccagagacaactgtttttgcggcagcagaacatcatacgtctactgatacgttggcatgggtatatgtgccagacacattatcagctttagctctagatgcatatgaatcattgaatgacgcgatgccgatgatttctgaacacgcgaatcgcgaacgtttggacaaactgccaacgattggtcgtgtgaatcatccagtggaagaagcacagcggtttgcgagtgattggagtgaggtacgtccagaatggggcttggctaaaaatgcatcatttataattggacgacgccaattaacaaaaggcattgatttagaagggcggacatttttacacaattatgattggcgtaaagataaagatggcacattattaaataccatcatttctggtccggcacttgtggcacaatggattaatttacaatattatgcgtcgacagttgcgccgcatttttacggaagtgggaataaagcgacacaaaccgtcacgtcaggtgttggtgtcatgcaaggtaatgcgagtgatctgatgtatggcttatcatggcaatctgttatggctgctgatcgaacgatgtatcattcgccaattcgtttgcttgtcgttattcaggcacccgactatgttgtagctagactactcgcgaataatgagcatttcgctaggaaggtgtctaatcattggctgcgtttaatgagcgttaatgaggaagggcgttttaaaagttggatttaacgatgatatgttgcgatgctaagtaactaatatatcatcatatttacaatgttctagcttcttaaaatatactaaaaatgataaacttaatgtaatagttgatgtcgtgataacgatacaaagatgaagtaatcaattttaatattattggagttagtgatatgaaaagaacgaaaggtgaaatcgaagctgaaatcagtaaagccattacgcaatgggaaaaagatttccttggcagaggttccttgtcggttaaatcagacattttaagagatatggtgattattagtttacaaggtatcttaacgccagcagaatatcgtgtgtgtagtacgaatgaaggattactaaatattaaacgaacacgttctgaattagttgaatccggtgagcaagatttgaatgatatcattcttaaaattacaggtatcaaagtgatgagcttccacagtgatttaagtacagttacaggtgaacgtattatcgtattcaaacttgaggataatttggaaaagcatatttaagaaggttaggtatgcttctgctggcttattaaagctatagaagtatgtttggttaaacagcgcaacgccatatatttgggtgtgctgtttttctattatatgatgtgtttattacgtggatgaatgcgtgggtctgaatatagcccgtgaaaggcgtatgtcataaaatttgcgaatggtgacaagtcaacgcaagcatatttgttgcgagacatgcccactatccttttacataaagagtatatgtgtgacgtaggcatataatcgataaagtattcctaaaaaattaggtataatgaccattgttgcaataagtttttcggccttgaaaccgataacgcatagtataataggaataaaatataatacaaatatccagtaaatcaaatttgaaaacgatggatgaataggggtaaagaatctaactaatgtaatgattaacgctatatagacaaaaataactctattgatacgccttaccccctctgtataataaatataaatcgtactaaattgaaaatagcaaaatattgttatttcaattatacaatgttttatttgcaatatacataacaatatgaactttataattttgatattgtcggtaaagtgaaatttgtggcacattgatattatggataacatttgtaaaataaaaatgatgatacgaggagatagtaagatgatagataaaaaattaacatcaccgaaaatgaccgtgcctttatttttaatcgcgctgattgtatttataggtatgttttacggtgtagtgacaaatcaagaatggcttaaaaatatagatatgggatcattaacatggtttacagattatttcggtgagccacaacgtcagtatgttaacaatttgtttaattactatatgacgtttagtgcggaaattggagatgtcaaaggtgtcgtgttgatttcaattatcgtcacaatcatactgtttattaaacagaggcatttagcggtttggtttgtgacatatttggtttcaggtgtcatcatgaacaaattaattaaagatactgttttacgtccaagaccatataatcatttagccgttgatacagacttttcatttccaagtggacattccaacgccagcacattattatatttcgccttaatgatcattattatttcagttgctgctaagacaataacaaaagtgttgagtgcgctagttatgggaatattatggcttagcatattattttgtcgcctttattttcatgcacattacttttcagatgtcattggcggcacgtcactagcaatcatttgggtagcgttattcttaatggtatacccatactttattaatcatcgacgacaacgcgtttagcaaacatctttagacatagtggaggtatatagaaaaatgagaattaaaacaccgagtccatcttatttaaaaggcacaaatggacatgcaatattattattacattcatttacaggtacaaatcgggatgtgaagcatcttgcagctgagttaaatgcacatggattcagttgttatgcaccgaattatccaggtcatggtttattgttgaaagatttcatgacatataatgtagatgattggtgggaagaagttgagaaagcttaccaatttttagtcaatgaaggttatgaatctatcagtgcaacgggtgtgtctttaggtggattaatgacattaaaattggcgcaacactatcctttgaaacgtatcgctgtcatgtcagcaccaaaggaaaagagtgacgatggtttaatagaacatttagtttattatagtcaacgcatgtcggatattttaaatttagatcagcaagcatcgagtgcgcaattagcagcaattgatgattatgaaggtgaaattacgaagtttcaacattttattgatgatatcatgacaaatttaaatgttattaaaatgccagctaatatattatttggtggtaaagatgcgccatcctatgaaacaagtgcacactttatttatgaacatttaggatcagtagacaaagaattaaatggtctgaaggattcgcatcatttaatgacgcatggagaaggcagagatattttagaagaaaatgttattcgctttttcaatgctttaacataattgaagattttaaaaattaacacttgagtgacgatgttattatatttgtcatttgagtgttttttgtggcgtgatagtatagggaacttagctaaagttaatttgtattgtaatgtcgtgggaattttgttggcattgtacctgaagttgttatgtattgtaatgttgtgggcattttatgggcattgtacctgaagttgttatgtggcgagatgttggggatatagatggtgttgtatgtggcgagatgttggcgcacgtatacagcgttgaaccagaaattttaatgtagcgtaatgacaacacattacaagagttgactatattatgataaatccaggcgctaccgtattaatgaaacaattttgatgcaggtgtattgcatgttatttacatacatgttagagtgttacttaaacacgtagacgctttaacgctttaaaggagatgcgaatgatgaaaagacaacaatcacaatggaagtcatcaactggatttattttagctagtgcgggttctgcaatcggtcttggtgccatgtggaaattcccatatatggcagggatttatggcggcggtgcctttctagctatgttcttaatattcaccatttttgttgggttaccattactcattatggaattcactgttgggaaaatgggacggacatatacaacacaaatatatagtaaattaactggtaaaaaatggctcaatatcattggctggaatggtaatttggcagtgtttattttatttggcttctatagtgttatcggtggttggattgtcatttacatcggacaagtattatggcaattagttatatttcaacgcatcaatcatctccaagaaatgaattttgaagcggtaatatcaaatccttggttaaccgttctagggcaaggtatattcatattcgctacgatgattattgtcatgttaggtgttgaaaaaggattagaaaaggcatcgaaagttatgatgccattgctgtttgtctttttaatcatcattgtgattaagtctttaacattagatggtgccttagaaggtgtgaaatttattttacaaccaagagtatcagagattactgctgacggtatcttgtttgcgctaggccaatcattctttacgttatcattaggaactacaggtatgattacttatgcgagttatgcctctaaagacatgacgattaagtcatcagctatttctatcgttgttatgaatatctttgtatctgtattggcaggtctagctatatttccggcgttacatagttttggctatgaaccacaagaagggcctggattattatttaaagtactaccaatggtctttagtcaaatgcatctaggcacattattctatttgggattcttagtgctgttcttatttgcggctttaacgtcatctatttctttattagaattaaatgtttctaacttcacgaagaatgacaatacaaaacgtaaaaaagtcgcagtgattggtagtattttagtatttatcattagtattccagcaaccttatcttttggtatcttaaaagatgtaagattcggtgcgggaacgatttttgataatatggatttcatcgtttcgaatgtattgatgccattaggcgcattaggtactacgcttgtcgtaggacaattattagataaaaaattattacaacaatattttggtaaagatcgatttagattattcagtggttggtattacttaattaagtatgcgatgcctgtcgttattattttagtctttatcgtgcaattatttagttaatatatagaagcatctgacacacaagtatttgtgttgctcaggtgtttttttgtttggaattgaaaagttagtactggttctgaattaatcgaaacttagataattgcaaaataacaaaatgtcgtttataattcttatctgaaaagtaagaattaaaattgagacatgaagaaaggtttcattcatttgatcggcatgtcagatgagggtgcatctatgattacttatgatttaattggcaatacaccattagtactgttagaacattatagtgatgataaagttaaaatttatgccaagcttgaacaatggaatccaggaggcagtgttaaagacagactcgggaaatatttagtagagaaggcaattcaagaagggcgtgtgcgtgcaggtcaaactattgttgaagcgactgctggcaatacaggcatagggttagctattgcagcaaatagacatcatttgaaatgtaagatctttgcgccgtatggtttttcagaagaaaagattaatattatgatagcgcttggtgcagatgtttcaaggacgagtcagtctgaaggtatgcatggggcacaattagctgcacgttcctatgccgaaaaatatggtgccgtttatatgaatcaatttgaatccgaacataatccggatacatattttcatacattgggacccgaattgacttcagcattacagcaaattgattattttgtggctggtattggctctggcggtacatttacaggtaccgcacgttatttaaagcaacatcacgtgcaatgttatgccgttgagccagaagggtccgtgttaaatggagggccagctcatgcacatgacactgaaggtatcggttctgagaaatggccgatatttttagagagacgtcttgtagatgggatatttacgattaaagatcaagatgcctttcgaaatgtcaaaagtttggctataaatgaagggttgttagtaggcagttcttcaggtgcagcattacaaggtgcattgaatttaaaagcgcaactaactgaaggtacgattgttgtcgtatttccagatggtagtgatcgctatatgtctaaacaaatatttgaatatgaggagaataataatgaacaagaaaactaaattaattcatggtgggcacacaacagacgattatacaggtgccgttacaacaccaatttatcaaacaagtacatatttacaagatgatattggtgatttacgtcaaggatatgaatattctcgtactgcgaatccaacaagaagttctgtagaaagcgttattgcgacattagaaaatggcaaacatggctttgcatttagttcaggtgttgcagcaatcagtgcagttgttatgctgttggacaaaggagatcatattattttaaattcagatgtatacggcggtacttatcgcgcattgacaaaagtatttacacgatttggcattgaagtggattttgtagatacaacgcatacagattcaattgtacaagcgatacgcccaacaacaaagatgttgtttattgaaacaccttctaatccattattacgtgttactgacattaaaaagtctgctgaaattgcgaaagaacacggtttgatttcagttgttgataacacatttatgacaccttattatcagaatccattagatttaggtatcgatattgtcttacattctgcaacgaaatatttaggtggacatagtgatgtcgttgctggtttagttgcaacatcggatgacaagcttgcagaacgtttagcatttatttcaaattcaacaggtggcattttaggacctcaagatagctatttacttgtgaggggtattaaaacattaggtttacgtatggaacaaattaatcgcagcgttattgaaattattaaaatgttacaagcacatccagctgtgcaacaagtgttccacccaagtattgaaagtcatttaaatcatgatgtccatatggctcaagcggatggccatacaggtgtgattgcatttgaagtgaaagatacagaaagtgccaaacaattgattaaagcaacatcgtattacacattggctgaaagtttaggtgcagtggaaagtttaatttcagtacctgcactgatgacacatgcatccattccagtagatattcgagctaaagaaggtattacagacgggcttgtaagaatttctgtaggtattgaagatactgaagatttagtagatgatttaaaacaagcactagatacgttataaataatagcagcactggcatatattttgagttcaacattttttgttcttgaatatgctagtgcttttttagtgcgatgttaatatttcgtgattgagttatgcacgtttggtggtcatttttatggatttaattcgataaatgtcatagtagtctcacaattcgtcattgtcacatgaattacttattttttaattttttagaaaattcggcaaattgtattgacgatatatgcaattttacatataatgctcttattcctagtggattaataagaatttgtaggagggggctttgcatgattgagtttcgacaagttagtaaatcatttcataagaaaaagcaaacaatagatgctttgaaggacgtatcatttacggtcaatcacaatgatatttttggtgtgattggatatagtggtgcaggaaaaagtacgttggtaagactcgtgaatcatcttgaagctgcctcgaatggacaagtgattgtagatggacatgatattacgaattatagcgataaaatgatgagggatattaagaaagatatcggtatgatatttcagcatttcaatttattaaattcagctacggtatttaaaaatgtagcaatgccactcattttaagtaagaaaagcaaaacagaaattaagcaacgagtaacagaaatgcttgaatttgtaggattgagtgataaaaaagaccaatttcctgatgaattatctggtgggcagaagcaaagggtggctattgcaagagcgcttgttactaatccgaaaatactcctatgcgatgaagcaacaagcgcattggatccagcaacgactgcttcgatattgacgttattaaagaatgtcaatcaaacctttggcattacaattatgatgattacacatgaaatgcgcgttattaaagacatttgtaatcgtgttgctgtaatggaaaaggggcaagtggttgaaacaggaactgttaaagaggtgtttagtcatcctaaaacgacgattgctcaaaattttgtgtctacagttatacagactgagccaagtacatcattgattcgtcgattgaatgacgaacaagttggcgattttaaagattataaaatcttcgtcgaggaaactcaggtgacacaaccgattataaatgacttgattcaaatttgtggcagagaggttaaaattttattttcatctatgtcagaaatacaaggtaacaccgtatgttatatgtggcttcgatttaatatagatctacaatttgatgacacgacaataaatcaatatttcaaagagaaaaatattcaatttgaggaggtgcattaacatatgtttggttctgatttagacagtgcacagttagtgcaagcattatacgaaacgctatatatggtatctattgctttatttttaggagcagtgattggtattccattaggtgtcttattggtaattactcgaaaacaaggcatatggcccaatatagtgatacatcaagttttaaatcctttaatcaatattttaaggtcactaccatttattattttgttaattgcgattgtgccattcacaaaattagtagtaggtacttcaattggtacgactgctgccatcgtgcctttaacagtatatgtggcaccttacattgcaagacttgttgaaaactcattattagaagtagacgaggggattattgaagcggcgaaagcgatgggcgcttcaccactacaaatcattagatattttttaattcctgaagcgttaggttcattagtattagcaattaccactgcgattattggacttattggaagtacggcgatggcaggagctgttggcggtggtggtataggagacttagctttagtgtatggttatcaaagatttgatacgacggtcattattattaccgttattgtattagtcattattgtccaagtgattcaaacgctagggaatgtcctagctagattcatacgtagacattaatgatatatagtgaagattttgaaaggaattgatagaatgaaaagattgattgggttagttatcgtagcacttgtattattagcagcgtgtggtagtaacaatgataaaaaagtaacaattggtgtcgcatcaaatgacactaaggcttgggagaaggttaaagaattagctaaaaaagatgatattgatgtggagattaagcacttttccgattacaatttaccgaataaagcattaaacgatggtgatattgatatgaatgcattccaacattttgcatttttagatcagtataagaaggcacataaaggaacaaagatttcagcattgagtacaacagttttagcaccgttgggcatttactcagataaaattaaagatgtcaaaaaggttaaagatggtgctaaagttgtcattccaaatgatgtatcaaaccaagcacgtgcacttaaactattagaagcagctggtttaataaaactgaaaaaagatttcggattagcaggtacagtgaaagatataacgtcaaatccaaaacatttaaaaattactgcagtagatgcacagcaaactgcgcgtgctttatctgatgtcgatattgcagttattaataacggtgtagcaactaaagcggggaaagaccctaaaaatgatccgatatttttagaaaaatcaaattcagatgctgtaaagccatatattaatattgttgcagttaatgacaaagacttggataacaaaacatatgctaaaatcgtagaattgtatcattcaaaagaagctcaaaaagcgttgcaggaagatgtcaaagatggagagaaacctgttaatttatctaaagatgagattaaggcaatagaaacgtcattagcaaaataaattatattgcgtcctacaagcaaagttcatgcttatgtttgtagggcgttattgttggagaataaaattatttccaatagagaaagggattgtaatcattttatagtgaaatattatgaaattgtaataatttagatattgtaaaatctaataagttgtaataattttaaggggtaattataaaatttgatgatacagtatatgatttttttgtaatcataatgtcatcaaacatcaacctattatacataataaaatcgtataatgatgtagtattcataaattcggataaaagaatgttaggaaagttaagcaagaggaggattttaaagtgcaaaaaaaagtaattgcagctattattgggacaagcgcgattagcgctgttgcggcaactcaagcaaatgcggctacaactcacacagtaaaaccgggtgaatcagtgtgggcaatttcaaataagtatgggatttcgattgctaaattaaagtcattaaacaatttaacatctaatctaattttcccaaaccaagtactaaaagtatctggctcaagtaattctacgagtaatagtagccgtccatcaacgaactcaggtggcggatcatactacacagtacaagcaggcgactcattatcattaatcgcatcaaaatatggtacaacttaccaaaacattatgcgacttaatggtttaaataatttctttatttatccaggtcaaaaattaaaagtatcaggtactgctagctcaagtaacgctgcgagcaatagtagccgtccatcaacgaactcaggtggcggatcatactatacagtacaagcaggtgactcattgtcattaatcgcatcaaaatatggtacaacttatcaaaaaattatgagcttaaatggcttaaataatttctttatatatccgggtcaaaaattgaaagtaactggtaatgcatctacgaactcaggatctgcaacaacgacaaatagaggttacaatacaccagtattcagtcaccaaaacttatatacatggggtcaatgtacatatcatgtatttaatcgtcgtgctgaaattggtaaaggtattagtacttattggtggaatgctaataactgggataacgcagcggcagcagatggttacactatcgacaatagacctactgtaggttctatcgctcaaacagatgtaggttattatggtcatgttatgtttgtagaacgtgtaaataacgatggtagtattttagtttcagaaatgaactattcagctgcaccaggtattttaacttacagaacggtaccagcttaccaagtaaataattatagatatattcactaaagtcttacgtatataaatatataatgaattcctattacatttcacaagctgaaaagttggattgaatcctaaactttatggcggggctatcaaagtcgtgattgttgtaataggaatttttgtataagaaaaaggattggtcgaatgaacttcatgttctatgttcgaccaatccttttctgaattagtattcatgctttactttgcgaatgcttgtaaataatctagcaccgtttgttattaaagtaacaactgccactgcttttttgaacttacgtggtgacttaattgaaatgtaaaagtctaacacggttcctacagtgcttaaacctaatgaaagatatactaattttttatttttagcatgatatttatagccattgtagccgtcgactatgaaacctgcgacatttagtaaacttgataaacgttgtgatttggaacgttttgccataataataattccccctagtatcttctgtttatatgaaaaattgggtgcgctgaattgctaacgttttgcgctataactactcatatatgataacataattgtacagtataattttaaaaattgatttcacaaagttggggtgtcaaagatgattaaatgtgtctgtttagttgaagaaacagctgataaaatattacttgttcaagtaaggaatcgcgaaaagtattatttcccaggtggtaaaatagaagaaggggaatcacgagtacaagcgctgttaagagaagtaaaagaagaattaaatttaacattaacaatggatgaaattgaatatatcgggacaattgtaggtcctgcatatccacaacaggatatgttaactgagttaaatggatttcgcgcattaaccaaaatcgattgggaaaacgtaactatcaataatgaaattacggatatacgctggattgataaagataatgatgcgttgattgcgcctgctgtcaaagtttggattgaaacgtatggtggtaaacatgacaaataatgacaccatcatgttacgacattatgtcccacaagattattcgatgttagaagcttttcaattaagtgaaagtgatttgaagtttgttaaaacgccagaggaaaatattacagctgcaatgtctgataatgaaaggtatcccatcgttgtaatggatggcaggcaatgtgtggccttttttacattacatcgtggaaaaggggtcgcaccatttagcgataaccaagatgcagtatttttcaggtcatttagtgttgatcaacgttatcgtaatagaggaataggtaaagtggtaatggaaaaattggcgtcatttatcacttcaacatttcaggatattaatgagattgtgttaacggttaatactgacaatccacatgccatggcactttatcgccaacaaggatatcaatatatgggagatagtatgttcatcggaagacctgttcatattatggcgttaactataaaataaattaaatttaaaagcatctttactcatcgtcgaccacaacaattaatgatgaataaaggtgctttttgttatagatcatcggacaatttactatagtaaaaagcgacctagtgaacaattgacatatatccacaggtcgcttaacttaagttatattgctagttgcgattaattgatagactcatcatttttgcgctgtcgagatggtctttttattaaaaatgccgtaatccaagccgtaatcggaatactgattgcaacggcaataccgcctaaaataatagaaataaattcttgggcaaatattttcgagtttataatatgaccaaatgaatatttaagtttgaaaaaccaaataaataaagcaagttggccaccaaaaaaggcaaggtaaatcgtgttcgcagatgtcgctaaaatttctctaccaacacgcatgccagattggaataattcgtattgcgtaagcgttggattcacttgatgcaattcataaatgggtgaactaatggtaattgttaaatctatcacagctgcaataacagcaagaataatagtgaacaccataaattgaaccatatcaatgccaatattcattgaatacacatatgtttcatcttgttgttcggttgaaaagccttgtagatgaccgaagtagaccgataaataaatgagtgtaatcaacaatattgttgtaacgatagtgctgataaatgcagcttgtgttttaacattgtaactattgagtacgaataaattacaagcgccaataataatgcagaaaaagaatgtgacgacataaatcggtacgccaaaaataatcaacacaatactaataattaaaatagcgaaatttaaaaatagggttaaataagagatgaatccctttttacctccgaaaattatcatcagaaagaggagcaataccgccaatataaatacagcattcattgtttcgccctccttaatgtttcaaatatttccataaacaatattgtgataggaattgtaagtacgatacctataccgcctgttagtgcgcgcgcaatttctaacgaccaattcatcgaaatagtataagtcacagtatttgcattttttaaaaagattaaaaacataggtagtgcaccggataaatatgagaataataagatgttagtcattgttcccataatatcttggccgatgtttcgcccagcaagcgcccatctcctcattgaaatgtgtggcgtacgctgtaaaatttcatgcataccactagcaattgtaattgcaacatccataatagcgccaagtgaacctattaacactgaggctaggaagatatctttcggtggtaatgataaaaagttcatcgtttcatatttaatgcctttaccatctgtcatatatatgattaattctgttaaacctatactcaaaaaagttccgataattgtactggctatggtaatgagtgtacgcatatgccagcctgtaacgagcaataaagtgagtattgttgaacagatcatggcaatggtcatgagtaagaataaattaatattgctatgttgaatatgaatgtaaattgcgattaatatggcaatagaattcaagattaacgataaaatcgattgcagtccgactttgcgaccaaccaataatacagttaataagaacaaaccagtgatgataaccgttaaggtatcacgcttcttttctataatataagcatcactcggcttgttagaaatatgtaataatacttttccgtgtgtgcgaaatgcctcagaatctgcttgcgatttgacgtactgatgattaatcgtcgtcgtttctccagcaaattgaccatttaatattttgacttttaattgatttttatatttaatatcacgattattttgtgcatcttttgtaggtgtcgaagaaacatgtttgacatctataatttgaccaattggtttgttgtaaaagttctcattattgaatgtaaataaaatagcaccaatgaatgcgatgcagaacaaacctaaaattatattaaatggctttgtaaataaatttctatatttcaaaaacaaaaccccaattctatgaatgaattaatatggtgattatacgcccttaattttttattttcaaagatattactgctaagtgtaaaacgaaaatcatcattgatagcatcgaattacttaatggaatgtagacgttttagtcattaattgctgaatgagtgttaataagataccaatatcactcttcgtataaggttctttcgtaatagcacatatcgttctttttaattcagtatgatctaattttatatctatccatgatttagattctggtaaatgtatattttgtgatgaaatgatgtaaccttctttttgacgaaggagatactgcgcaagtggttggctactgattgtgtatacatctgatttagtaatcttgcgcaattgtttttttacagtttcggcaaatggtgccaagcaataaatatgactatgctcaaactgaattaatggtgggtgtgtcgccatcgtaattggatcgtctgaaggcgcatataaatgatagtgctcttcgaataaaggtagcatatgtaattgtttgtgtttacgtatttctggtgtaagttccgtgaaaccaatgtctatattcccatttaatacgctatttataatcgtgtcatgatctaataagttcggtatgacatgtgtatcattttgtaaatgaaacgtttggataagtggtagtaacatgtgggatacgtcactctcatcatagccaatgtagatacttttatttttagttaatccatggctttgaaattgttcaatcgtgctatctaaatgttcaataatgcgcagagcttcattaaataataatttcccttcagaagtgagcgtaatattgcgtccttgctttttaaataaagacacattaagttcttgttctaataatgtaatttgacggcttatcgctgattgagcaatgtttagttcaagtgctgtttcggagatatgttctcttttagcgacctcgataaaatatcttaattgtttaatttccatagtgatataggcacctccaaaaatgagtgttttgtaactattatagcaatattattgataaatgttctattttttagatgaatatcttctattttatatattgaacagataaattttttagattatagtaattatcattaataactaatatcagaatattctaaaaaaggggtgtgcatcatgcacaatgagaaattaattaaaggcttatatgactatcgtgaggaacatgatgcgtgtggtattggtttttatgcgaatatggataataaaaggtctcacgacatcattgataaatcgcttgaaatgttgcgacgcttagatcacaggggcggggtcggcgcagatggcatcactggtgatggcgcaggtattatgactgaaataccttttgcatttttcaaacaacatgtaacggactttgatatcccaggtgaaggtgaatatgccgtggggttatttttttccaaagaacgcattttaggttctgaacatgaagcagtttttaaaaaatattttgaaggtgaagggttatcaatccttggttatcgtaatgtaccagttaataaagatgccattgctaaacatgtagcagatacgatgccagtcattcaacaagtgtttattgatattagggacattgaagatgttgaaaagcgtttgtttttagcgagaaaacaattagagttctattcgactcagtgcgatttagaattgtattttacgagcttatcacgcaaaacaattgtatataaaggttggttacgatcagaccaaattaaaaaactctatacagatttatcggatgatttatatcaatcaaagctagggttagtgcattcgagatttagtacgaatacattcccgagttggaaaagggcgcatcctaaccgtatgttaatgcataatggtgagattaacacgattaaaggtaatgtgaactggatgcgagcacgccaacataaattaatcgaaacattatttggcgaggatcaacataaagtgtttcaaattgtcgatgaggatggtagtgactctgccattgtagataatgcgctagagttcttatcgttagccatggagccagaaaaggcagcgatgttactcatacctgaaccttggttatacaatgaagcgaatgatgcaaatgtacgtgcattttatgaattttatagttatttaatggaaccgtgggatggtcctacaatgatttcgttctgtaacggtgacaaacttggcgcgcttacagatagaaatggattacgtccaggtcgttatacgattactaaagataactttattgtcttttcatctgaagtgggtgttgtggacgtacctgaaagtaatgttgcttttaaaggtcaattgaatcctggaaagttattgcttgttgattttaaacagaataaagtcattgaaaataatgatttgaaaggtgcgattgctggagaattaccatataaagcgtggattgataaccataaagttgactttgattttgaaaatatacaatatcaagattcgcaatggaaagatgagacgttatttaaattacaacgtcagtttgcatacacgaaagaagagattcataagtatattcaggaacttgtagaaggtaagaaggatcctatcggtgcaatgggatatgatgcgccaattgcagtgttgaacgagcgaccagaatcactatttaattactttaaacagctgtttgcacaagttacgaatccaccaattgatgcgtatcgtgaaaaaatcgtaacgagtgaactttcttatttaggtggcgaaggtaacttactagcacctgacgaaacggttttagatcgtattcaattgaaaaggccggtattgaatgaatcacacatagcagcgattgatcaggaacattttaaattaacttatttatcaacggtatatgaaggggatttggaagatgcgttagaagcattaggccgagaagcagtgaatgctgtaaagcaaggcgctcaaattctagtgttagatgatagtggattagttgatagcaatggctttgcaatgccgatgttactcgcaataagtcatgtgcatcaattacttattaaagcagatttacgtatgtctacaagtttagtcgctaaatctggtgagacacgagaagtgcatcatgttgcttgtttactcgcatatggcgcgaatgcaattgtgccatacctagcgcaacgtacagttgaacaactgacattgacagaagggttacaaggcaccgttgtcgataatgttaagacatatacggatgtattgtccgaaggtgtcattaaagtaatggctaagatgggaatttcgacagtgcaaagttatcaaggtgcacaaatatttgaagcgattggcttgtctcatgatgtgattgatcgttattttactgggacacagtctaagttatcgggtatttcgattgatcaaattgatgctgaaaataaagcacgtcaacaaagtgatgataattatcttgcatcaggtagtacattccaatggagacaacaaggtcaacatcatgcttttaatccggaatctattttcttattgcagcacgcatgtaaagaaaatgactatgcgcaatttaaagcatactctgaagcggtgaacaaaaatagaacagatcacattagacatttacttgaatttaaagcatgtacaccgattgacatcgaccaagttgaaccggtaagtgacattgtcaaacgctttaatacaggggcgatgagttatggatcgatttcagcggaagcacatgaaacgttagcacaagccatgaaccaattaggtggaaagagtaatagtggtgaaggtggcgaagatgcaaaacgttatgaagtacaagttgatggaagcaacaaagtaagtgcgattaaacaagttgcttctgggcgttttggtgtaactagtgattatttacaacatgccaaagaaattcaaattaaagttgcgcaaggtgcaaagcctggtgaaggtggtcaattacctggtactaaggtatatccgtggattgcgaagacaagagggtcaacgccaggtatcggtctgatttcaccaccgccacatcatgatatttattcaatagaagatttagcgcaactgatacatgatttaaaaaatgcgaataaagatgcagatatcgcggtaaaattagtttcgaaaacaggtgttggtaccattgcatctggggtggcaaaagcatttgcagataaaattgtcatcagtggttacgatggtggtacaggggcttcacctaaaacgagtattcagcatgccggtgttccttgggagattggtttagcagaaacacatcaaacattaaaactaaacgacttaagaagtcgtgttaagttagaaacagacggtaagttattaactggtaaagatgtagcgtacgcatgtgcgcttggagcggaagaatttggatttgcaactgcaccattagtggtgttgggctgtattatgatgcgtgtatgccataaagatacatgtccagtaggagttgcaactcaaaacaaagatttacgtgctttatatagaggtaaagcacatcatgttgttaattttatgcattttattgcacaagaattaagagaaattttagcatctttaggtttgaaacgtgtagaagacttagttggaagaactgatttattacaacgatcatcaacattaaaagtgaatagcaaagcggctagtattgatgttgaaaaactgttatgtcctttcgatgggccaaacacaaaagaaattcaacaaaatcataatcttgagcatggatttgatttaacaaatttatatgaagtaacgaagccgtatattgctgaagggcgtcgctatacaggtagctttacagtaaataatgaacaacgtgatgtaggagttattacaggtagtgagatttcgaaacaatatggagaagcaggacttcctgaaaatacaattaatgtttatacgaatggtcatgctggtcaaagtcttgcagcatatgcaccgaaaggcttaatgattcatcatactggagatgcgaatgactatgttggtaaaggattatctggtggtacggtcattgtcaaagcaccttttgaagaacgacaaaatgaaattattgctggtaacgtctcattctatggtgcgacaggtggtaaggcatttattaacggtagtgcaggagaaagattctgtattagaaatagtggtgtagatgttgtcgttgaaggtatcggtgaccatggattagagtacatgactggtggacatgtcattaatttaggtgatgtaggtaagaacttcggtcaaggtatgagtggtggtattgcttacgttatcccgtctgatgtagaagcttttgttgaaaataatcaactagatacgctttcgtttacaaagattaaacaccaagaagaaaaagcattcattaagcaaatgctggaagaacatgtgtcacacacgaatagtacgagagcgattcatgtgttaaaacattttgatcgcattgaagatgtcgtcgttaaagttattcctaaagattatcaattaatgatgcaaaaaattcatttgcacaaatcattacatgacaatgaagatgaagcgatgttagctgcattttacgatgacagtaaaacaatcgacgctaaacataaaccagccgttgtgtattaaggaaagggggagatacgatgggtgaatttaaaggatttatgaagtatgacaaacagtacttaggtgaattatcactggtagaccgtttgaagcatcataaagcatatcaacaacgatttactaaagaagatgcctctatccaaggtgcacgatgtatggattgtggaacgccgttttgtcaaaccggacaacagtatggtagggaaacaataggttgtccaattggaaactacattcctgaatggaacgacttagtgtatcatcaagattttaaaactgcttatgaacgcttaagcgaaacaaataactttcctgactttacagggcgtgtatgtcctgcaccatgcgaaagtgcttgtgtgatgaagattaatagagaatcgattgcgattaaaggtattgaacgcacaattattgatgaagcttttgaaaatggttgggtagcgccgaaagttccgagtcgccgtagagatgaaaaagtggcaatcgttggaagcggtccagcaggattagctgctgctgaagaacttaatctactaggatatcaagtaactatttatgaacgtgctagagaatcaggcggtttattaatgtatggtattccgaatatgaaacttgataaagatgtggttcgacgtcgtattaagttaatggaagaagcgggcattactttcattaatggtgttgaagtaggcgttgatattgataaagcaacgttagaatctgagtatgatgccattatattatgtactggtgcacaaaaaggtagagatttacctttagaaggacgcatgggtgatggtatacatttcgctatggattatttaactgaacaaacgcagctgttaaatggagaaattgatgatattacaataactgcaaaagataagaatgtcattatcattggtgctggtgatacaggggcagactgtgtagcgacagcattaagagaaaattgtaaatcgattgttcaatttaataaatatacgaaattgccagaagcaattacatttacagaaaatgcatcatggcctttagcaatgccggtgtttaaaatggactatgcgcaccaagagtacgaagctaagtttggtaagaaaccacgtgcatatggtgttcaaacaatgcgttacgatgttgacgataaaggacacatacgtggtttgtatactcaaattttagagcaaggcgaaaatggtatggtcatgaaagaaggacctgaaagattttggcctgctgaccttgtattattatcaatcggcttcgaaggtacagaaccaacagtaccgaatgcttttaacattaaaacggatagaaatcgaatcgtggcggatgatacaaactatcaaactaataatgaaaaggtatttgctgctggagatgctagacgtggtcaaagtttagttgtatgggcaattaaagaaggtagaggcgtagcgaaagcagtagatcagtatttagctagtaaagtttgtgtataatctttgtatggaaatggtggttacgttgacgttgtgtcatgctgaatcgagtttgaaataatctagtatctatcaacgtcacatgccatctttgtaacctaaaaacaaaggtttgtaagacaacaaatagattaattataagtagtgattttttacattcgttttataggtcaactgtagtggaagacaatgatttgtggtaatcatgtaatgcttaaaaacaatattgacttttacagaacgttcatatatgataaatattgtgtttaggaggaatacccaagtccggctgaagggatcggtcttgaaaaccgacaggggcttaacggctcgcgggggttcgaatccctcttcctccgccatcaatatttatattaaatactatatataatgaaggtaagtgctcaaattttgagtatttaccttttttatttgtctttgaatgactcgtaatttttgataatagaaatgataaggcattgagattggaagggcatttggcttgtggaatatacatagctaaatgtctttttttgttttgtgaaatatgatggatggcttgtgtggacaagtttgctatttatagatatgcatttttcaatttaggagttggccatgcatctacactttataatggtgagagcgtggtgaggtattgttaataacgcaattgtagcgaggagttattgctacatatgtcgttatggctcattgattttctgaaatggctatcccagataattgtgacaaaataaaaatattttgttgaaagcctttacataacttgtctagacaagttatactcgttttaagacattaagggagtgaaatatatggctgtaaaaagagaagatgtaaaagccatcgtaaccgctattgggggaaaagaaaatcttgaagctgcaacgcattgtgtaacacgattacgtttagtgctgaaggatgaaagtaaagttgataaagacgcattaagtaataacgcgttggtcaaggggcagtttaaagcagaccatcaatatcaaattgtcattggtccaggaacagtcgatgaagtgtataagcagtttattgatgaaacaggtgctcaagaagcttcgaaagatgaagcgaaacaagcagctgcacaaaaagggaatccagtacaacgtttgatcaaattgttgggagatatttttataccaatattacctgcgattgtgacagctggtttgttaatggggatcaataatttacttacaatgaaaggtttatttggtccaaaagcacttattgagatgtatccacaaattgctgatatttcaaacatcattaatgtgattgcgagtacggcatttattttcttaccagcattaattggttggagtagtatgcgtgtatttggtggtagtccgattctaggcatagtcttaggtttgattttaatgcatccgcaattagtatctcagtatgatttggcaaaagggaatattccgacgtggaacttatttggcttagagattaagcagttgaattaccaaggtcaagtgttgcctgttttaattgcagcttatgttctagctaaaattgaaaaaggattaaataaagtcgttcacgattcgataaaaatgttggtcgttggacccgtagcgcttttagttactggatttttagcatttattatcattggaccagttgcattattgattggtacaggtattacatctggtgttacatttatattccaacatgcaggatggcttggcggagcaatatatggattgttatatgcaccacttgtaattacaggactacaccatatgtttttagcagtagatttccaattgatgggtagcagcttaggtggtacgtacttatggccaatcgttgcgatttccaatatttgtcagggctctacagcatttggagcatggtttgtctataaacgtcgtaaaatggttaaagaagaaggcttggcattaacatcttgtatttctggtatgttaggtgttactgaaccagccatgtttggtgtgaacttacctctgaaatatccatttatcgctgcgatatcaacatcttgtgtattgggggcaatcgttggtatgaataacgtacttggaaaagttggtgttggtggcgtgccagcattcatttcaattcaaaaagaattttggccagtatatctcattgtgacagctattgctattgttgtaccatgtatactaacaattgtgatgtctcattttagtaaacaaaaagcgaaagaaattgttgaagattaataaaataaaaaaggggcgttcgttatttggacgtcctttattacgttataaggtggtaattgtgtgtcgaaagaaatagattggagaaaatccgttgtatatcaaatttatcctaagtcgtttaatgatacgacggggaatggtataggagatatcaatggaattatagaaaaattggattatatcaagttattgggtgttgattatatttggttaacaccagtgtatgaatcaccgatgaatgataatggctatgatatcagcaattatttagaaatcaatgaagactttggaacgatggatgattttgaaaagttaatcaaagttgctcatcaaaaagacttgaaagtgatgttagatattgtcattaatcatacgtcgacggagcatgaatggtttaaagaagcccgtaaatctaaagacaacccttatagagattattactttttcagatcatctgaagacgggccgccaacaaattggcattctaaattcggtggtaatgcatggaagtttgattctgagacagatgaatattatttacatttatttgatgtcagtcaagctgatttaaattgggataatccggaagtacgtcaatcgttatatcgcatagtcaatcattggatagacttcggcgttgatggttttcgatttgatgtcattaacttaatttctaaaggtgaatttaaggactctgacaaaataggtaaagaattttatacggatggtcctagagtgcatgagtttctgcatgaattaaatcgtcaaacgtttggtaacactgacatgatgactgtaggagaaatgtcttcgacgacgattgaaaattgtattaagtatacacagccagaacgccaagaattgaatagtgtttttaattttcatcatctaaaggttgattatgttgatggtgaaaagtggacaaatgcgaagcttgattttcataagttaaagaaaattctgatgcaatggcaacgaggtatttatgacggtggcggatggaacgcgattttctggtgtaatcatgatcagccacgggtagtgtctagatttggtgatgatacgtcggaagagatgaggatacaaagtgctaaaatgttagctatcgcactgcatatgttgcaagggacgccatatatttaccaaggtgaagaaattggtatgacggacccacattttacatcaatagcacaatatcgtgatgttgaatcgattaatgcctaccatcagttgttaagtgaagggcatgctgaagcggatgtgttagcgattttaggacagaagtcacgagacaattcgagaacgcctatgcaatggagtgatgatgttaatgctggatttacagctggtaagccttggattgatatttcggaaaattatcatcaggtcaacgttagacaagcacttcagaataaagagtctattttctatacgtatcaaaaattaatacaattaagacatacgcatgatattattacgtatggagacattgtgccacgttttatggatcatgatcatttatttgtttatgaacgtcattataagaatcaacaatggctagtaattgcgaatttctcagcatcggctgttgatttgccagaaggattggctagagaaggttgtgttgtgattcaaacaggcacagtggaaaataatacgataagcgggtttggtgcaattgtaatcgaaacaaacgcgtaaaataaattgagtggatgcgtttatatggcgaaacaaaaaaagtttatgaagatttatgaggcgttgaaagaagatatattaaacgggcagattcaatatggtgaacaaattccgtctgaacatgatttggtgcaattgtaccagtcatctcgagagaccgtgcgtaaggcattagatttgttggcattagacggcatgattcaaaagattcatggtaaagggtcacttgtcatttatcaggaggttacagagtttccattttctgaacttgttagttttaaagaaatgcaagaagaaatgggcgtcgcatatttaactgaagttgttgtgaatgaggttgttgaagcgcatgaagttccagaagttcaacatgctttaaacatcaattctagtgaatcactcattcatattgttagaactcgtcggcttaaccaacatgtgaagattgttgatgaagattattttctaaagtcgattgtttcagatataggtaatgatgttgcgagtgattctatttatgattatttggaaaaggtattaaatcttaatattagttattcaagtaagtctattacttttgaaccgtttgatgaacaagcatatcaattgtttggtgatgtatcggtggcttattcagcaacagttcgaagtattgtgtatttagaaaatacaatgccgtttcaatataatatttcaaaacatcttgcaaatgaatttaaatttaacgacttctcaagacgtcgtataaagtaaacaatgatataaatgatttatacttgcaattaactattaaaatatagtaatatatatcttgccgtgctaggtggggaggtagcggttccctgtactcgaaatccgctttatgcgaggcttaattcctttgttgaggccgtatttttgcgaagtctgcccaaagcacgtagtgtttgaagatttcggtcctatgcaatatgaacccatgaaccatgtcaggtcctgacggaagcagcattaagtggatcatcatatgtgccgtagggtagccgagatttagctaacgactttggttacgttcgtgaattacgttcgatgcttaggtgcacggttttttattttttaaatattaaaccgattattaagagttgaaaatatatatttatagaagctactttcttgaagacaattcagcgtattatacgtggaacatgtttgtgggaagtagcttttttatatgtgaagtttgattcaagtgaactcgatgcgcagtttgaatgatttttgtgtcaatgaaaagtaagaagttattatttgatgataaagaaatgatggtgaaatgagggggagtatcttacaatagaattattaatgagatacgttatgattattgacaatcaaatgcctacggaggacatatgcaaatatatttaagtactttaacagagttagattatgataaatctttaaatagtattgaagaaagttttgatgataatcctgaaacgagttggcaagcacgtgcgaaagtaaaacatttaagaaaatctccttgctataattttgaattagaagtaatagcgaaaaatgaaaataacgatgtcgttggacacgttttattaattgaagtagaaattaatagtgatgataagacgtattatggtttggcgattgcctctttatcagttcatcctgaattacgtggacaaaaattaggtcgtggcttggttcaagcagtagaagagcgtgccaaagcacaagagtatagtacggttgttgtagaccattgttttgactactttgaaaagttgggttatcaaaatgctgctgagtatgacattaaattagaatctggtgatgcaccgttacttgtaaaatatttatgggataatttgacggatgcaccacacggaatcgtaaaatttccagaacatttttattaattgttcaattaagaagtaaaggtattatcatgctataatgagaggtaattgtttatggaggtgctaacttgaattatcaagccttatatcgtatgtacagaccccaaagtttcgaggatgtcgtcggacaagaacatgtcacgaagacattgcgcaatgcgatttcgaaagaaaaacagtcgcatgcttatatttttagtggtccgagaggtacggggaaaacgagtattgccaaagtgtttgctaaagcaatcaactgtctaaatagcactgatggagaaccttgtaatgaatgtcatatttgtaaaggcattacgcaggggactaattcagatgtgatagaaattgatgctgctagtaataatggcgttgatgaaataagaaatattagagacaaagttaaatatgcaccaagtgaatcgaaatataaagtttatattatagatgaggtgcacatgctaacaacaggtgcttttaatgcccttttaaagacgttagaagaacctccagcacacgctatttttatattggcaacgacagaaccacataaaatccctccaacaatcatttctagggcacaacgttttgattttaaagcaattagcctagatcaaattgttgaacgtttaaaatttgtagcagatgcacaacaaattgaatgtgaagatgaagccttggcatttatcgctaaagcgtctgaagggggtatgcgtgatgcattaagtattatggatcaggctattgcatttggtgatggtacgttaacattgcaagatgcgttgaatgtcacaggtagcgtacatgatgaagcgttggatcacttgtttgatgatattgtacaaggtgacgtacaagcatcttttaaaaaataccatcagtttataacagagggtaaagaagtgaatcgcctaataaatgatatgatttattttgtcagagatacgattatgaataaaacatctgagaaagatactgagtatcgagcactgatgaacttagaattagatatgttatatcaaatgattgatcttattaatgatacattagtgtcgattcgttttagtgtgaatcaaaacgttcattttgaagtgttgttagtaaaattagctgagcagattaagggtcaaccacaagtgattgcgaatgtagctgaaccagcacaaattgcttcatcgccaaacacagatgtattgttgcaacgtatggaacagttagagcaagaactaaaaacactaaaagcacaaggagtgagtgtcgctcctgctcaaaaatcttcgaaaaagcctgcgagaggcatacaaaaatctaaaaatgcattttcaatgcaacaaattgcaaaagtgctagataaagcgaataaggcagatatcaaattgttgaaagatcattggcaagaagtgattgatcatgccaaaaacaatgataaaaaatcactcgttagtttattgcaaaattcggaacctgtggcggcaagtgaagatcacgtacttgtgaaatttgaggaagagatccattgtgaaatcgtcaataaagacgacgagaaacgtagtagtatagaaagtgttgtatgtaatatcgttaataaaaacgttaaagttgttggtgtaccatcagatcaatggcaaagagttcgaacggagtatttacaaaatcgtaaaaacgaaggcgatgatatgccaaagcaacaagcacaacaaacagatattgctcaaaaagcaaaagatcttttcggtgaagaaactgtacatgtgatagatgaagagtgatacatgacaagcgatataatcgtatgtataatgaaagaaacatcattttattgataaatatttattgattttcaaggaggaaatggaatatgcgcggtggcggaaacatgcaacaaatgatgaaacaaatgcaaaaaatgcaaaagaaaatggctcaagaacaagaaaaacttaaagaagagcgtattgtaggaacagctggcggtggcatggttgcagttactgtaactggtcataaagaagttgtcgacgttgaaatcaaagaagaagctgtagacccagatgatattgaaatgctacaagacttagtgttagcagctactaatgaagcgatgaataaagctgatgagcttactcaagaacgtttaggtaaacatactcaaggcttaaacatccctggaatgtgatcatagatgcattatccagaacctatatcaaaacttattgatagctttatgaaattgccaggcattggtccaaagacagcccaacgtctggcttttcataccttagatatgaaagaagacgatgttgttcagtttgccaaagcattagtagatgttaagagagaattaacatattgtagcgtatgtggtcacattactgaaaatgatccatgttatatttgtgaagataagcaaagagatcgttcagttatttgtgttgtggaagatgacaaagatgtcatagctatggaaaaaatgagagaatacaaaggtttatatcacgttttacatgggtctatttcgcctatggatggcattggaccagaagatattaatattccttcattgattgaacgcttgaaaaacgatgaagttagcgaattaatcttagctatgaacccgaacttagagggggaatctacagccatgtatatttctagattagttaagcctataggtatcaaagtgacgagattagcacaagggttatcggtaggtggcgatttagagtatgctgacgaagtaacattatctaaagcaatcgcaggtagaacagaaatgtaatgtcttctattaaacatttttgattttaatactatagtaagaaaagtcacagtgtaatcattgtggctttttttatggtgtggtgtgatgtactactttatttgcggtgtggcggtggtatggtttacctagttttactgagggatgggtaatctttaggaagcaagccgttggttgtgatttgttacttctaatagtaatgatgtgaattggattatcgaattagatctatggttatggtgtgttggtgctattaatttgataaatgcggttaatggttaatgactatgcaaatgaaattcttttgtaattgaaatgatagatgctggcttagtagttgtacttctttggtctaaagtttattaaatcagcctgtatagcggtgttttgagaggttatttaaaacttgtaaatttatttttaatttctggtaaaaaaataaagttctgttttgcggtttttttgattgatatggttagagaaaaatctgtttcttgttctaaaaaacgtactatttataagtggggattttttaagttcgatttttaggataagggcgttcagtacagatggcaaaggtgtaatttttactgttgttaagcagtttgaaagcctgtatagtatttatttgttgaggcaaacaaaacaactcaacttaagaaataacttgaattactaacgaaaattaattttaaaaagttgttgacttaaatgttaataaaatgtataattaattcttgtcggtaagaaaaatgaacattgaaaactgaatgacaatatgtcaacgttaattccaaaaaacgtaactataagttacaaacattatttagtatttatgagctaatcaaacatcataatttttatggagagtttgatcctggctcaggatgaacgctggcggcgtgcctaatacatgcaagtcgagcgaacggacgagaagcttgcttctctgatgttagcggcggacgggtgagtaacacgtggataacctacctataagactgggataacttcgggaaaccggagctaataccggataatattttgaaccgcatggttcaaaagtgaaagacggtcttgctgtcacttatagatggatccgcgctgcattagctagttggtaaggtaacggcttaccaaggcaacgatgcatagccgacctgagagggtgatcggccacactggaactgagacacggtccagactcctacgggaggcagcagtagggaatcttccgcaatgggcgaaagcctgacggagcaacgccgcgtgagtgatgaaggtcttcggatcgtaaaactctgttattagggaagaacatatgtgtaagtaactgtgcacatcttgacggtacctaatcagaaagccacggctaactacgtgccagcagccgcggtaatacgtaggtggcaagcgttatccggaattattgggcgtaaagcgcgcgtaggcggttttttaagtctgatgtgaaagcccacggctcaaccgtggagggtcattggaaactggaaaacttgagtgcagaagaggaaagtggaattccatgtgtagcggtgaaatgcgcagagatatggaggaacaccagtggcgaaggcgactttctggtctgtaactgacgctgatgtgcgaaagcgtggggatcaaacaggattagataccctggtagtccacgccgtaaacgatgagtgctaagtgttagggggtttccgccccttagtgctgcagctaacgcattaagcactccgcctggggagtacgaccgcaaggttgaaactcaaaggaattgacggggacccgcacaagcggtggagcatgtggtttaattcgaagcaacgcgaagaaccttaccaaatcttgacatcctttgacaactctagagatagagccttccccttcgggggacaaagtgacaggtggtgcatggttgtcgtcagctcgtgtcgtgagatgttgggttaagtcccgcaacgagcgcaacccttaagcttagttgccatcattaagttgggcactctaagttgactgccggtgacaaaccggaggaaggtggggatgacgtcaaatcatcatgccccttatgatttgggctacacacgtgctacaatggacaatacaaagggcagcgaaaccgcgaggtcaagcaaatcccataaagttgttctcagttcggattgtagtctgcaactcgactacatgaagctggaatcgctagtaatcgtagatcagcatgctacggtgaatacgttcccgggtcttgtacacaccgcccgtcacaccacgagagtttgtaacacccgaagccggtggagtaaccttttaggagctagccgtcgaaggtgggacaaatgattggggtgaagtcgtaacaaggtagccgtatcggaaggtgcggctggatcacctcctttctaaggatatattcggaacatcttcttmagaagatgcggaataacgtgacatattgtattcagttttgaatgtttatttaacattcaaatattttttggttaaagygatattgcttttgaaaataaagcagtatgcgagcgcttgactaaaaagaaattgtacattgaaaactagataagtaagtaaaatatagattttaccaagcaaaaccgagtgaataaagagttttaaataagcttgaattcataagaaataatcgctagtgttcgaaagaacactacgactctggtgtaccagttgtcgtgcaacggcatagctgggtagctatgtgtggacgggagtaagtgctgaaagcatctaagcatgaagcccccctcaagatgagattcccaacttcggttataagatccctcaaagatgatgaggttaataggttcgaggtggaagcatggtgacatgtggagctgacgaatactaatcgatcgaagacttaatcaaaataaatgttttgcgaagcaaaatcacttttacttactatctagttttgaatgtataatttacattcatatgtctggtgactatagcaaggaggtcacacctgttcccatgccgaacacagaagttaagctccttagcgtcgatggtagtcgaacttacgttccgctagagtagaacgttgccaggcaaaaaatggatgcgatgagccgcattgagaccgcaaggtctcttttttttatgtctaaaacatcaaaataaaaagcaaacacaaagaaaaatggcttggcgaagtgaaaacgtttgaatctgacgaaacgagaaaagagcgcaacgagtttagtagagctaaatgagtaagcgagagccgaaggagaggaaagaagcaagcgattgtcacaagtcaagaaaggttcttagcgacgatggtagccaacttacgttccgctagagtagaacgttgccaggcaaaaatggatgcgatgagccgcattgagaccgtgaggtctctttttttatgtctaaaacgtcaaaataaaaagcaaacacaaagaaaaatggcttggcgaagtgaaaacgtttgaatctgacgaaacgagaaaagagcgcaacgagtttagtagagctaaatgagtaagtgagagccgaaaaagaggaaagaagcaagcgattgtcacaagtcaagaaaggtctttagcgacgatggtagccaacttacgttccgctagagtagaacgttgctaggcaagaaatggatgcgatgagccgcattgagttttggaaatgataatttaataatgtgcacttttgattgtttaaatctgtgactagaagtataagtgaagacattcagaagtattataaaaagtgaacagcagtaagatagtttttaatcataaatcatcttactgctgtttttaggttttatgtctaatattttttaaatcgaaatacaaaaaggaaattaattattatacaatagacaagctattgcataagtaacactaacttttgtcaaagaagtgttactatataattaatacttttgaaagtaactaattccaaaacagtgtaaataaaggaagcgtatatcatggagcaacctattttaaataaattagaaagtttaaatcaagaagaagcgatttctttgcatgttccgggtcataaaaatatgactatcggtcatttatctcaattatcaatgacaatggataaaactgaaatacctggattagatgatttacatcatcctgaagaagtcattttggaaagtatgaagcaggtggagaaacattcagattatgatgcttatttcttagtgaatggcaccacttcaggaatattatctgtcatccagtctttttcacagaaaaaaggcgatatcttaatggcaagaaatgtacataaatctgtattacatgcgctcgatattagccaacaagaagggcattttattgaaacgcatcaaagtccgttaacgaatcattataataaagttaatttaagccgtttgaataatgacggtcacaaacttgctgtgttgacttatcctaactattacggtgaaacatttaatgtagaagaggttatcaaatctttgcaccaattaaatattcctgtactcattgacgaagcacacggcgcgcactttggattgcaaggatttccagattctacattaaattatcaagctgactatgttgttcaatcttttcataaaacgttaccagctttaacgatgggctcggtactttatattcataaaaatgcaccttatagagaaactattatagaatatctaagctacttccaaacatctagtccttcgtatttgattatggctagtttagagtcagctgccgagttctataaaacatatgatagtaccgtgttttttgataagagagcgcaattaatcgaatgtttggagaagaagggttttgaaatgcttcaagttgatgatccgttgaagttgctgataaaatatgaaggttttacaggtcatgatattcaaaattggtttatgaatgcacatatctatttagaattagcggacgactatcaagcattagcgatattgccgttatggcatcatgatgatacgtatttatttgattcgcttttacgtaaaattgaagatatgattttaccgaaaaaatcagtttctaaagttaaacaaacacaacttttaacaactgaaggtaactataaaccaaaacgctttgaatatgttacttggtgtgatttgaaaaaggcaaaaggtaaagttctggcgcgacatattgtcccgtatccgccagggattcctattattttcaaaggagaaacaataactgaaaatatgatagaattggtaaatgaatatctggaaactggaatgatagttgaaggaattaaaaataataaaattttagttgaggatgaataaaatgtcagcttttataacttttgagggcccagaaggctctggaaaaacaactgtaattaatgaagtttaccatagattagtaaaagattatgatgtcattatgactagagaaccaggtggtgttcctactggtgaagaaatacgtaaaattgtattagaaggcaatgatatggacattagaactgaagcaatgttatttgctgcatctagaagagaacatcttgtattaaaggtcataccagctttaaaagaaggtaaggttgtgttgtgtgatcgctatatcgatagttcattagcttatcaaggttatgctagagggattggcgttgaagaagtaagagcattaaacgaatttgcaataaatggattatatccagacttgacgatttatttaaatgttagtgctgaagtaggtcgcgaacgtattattaaaaattcaagagatcaaaatagattagatcaagaagatttaaagtttcacgaaaaagtaattgaaggttaccaagaaatcattcataatgaatcacaacggttcaaaagcgttaatgcagatcaacctcttgaaaatgttgttgaagacacgtatcaaactatcatcaaatatttagaaaagatatgatataattgttagaagaggtgttataaaatgaaaatgattatagcgatcgtacaagatcaagatagtcaggaacttgcagatcaacttgttaaaaataactttagagcaacaaaattggcaacaacaggtgggtttttaagagcgggtaatacaacattcttatgtggtgtcaatgatgaccgtgtagatgaaatattgtctgtgattaatcaaacgtgtggtaatagagaacagttggtttcacctattacacctatgggaggcagtgcggattcgtacattccatatccagttgaagttgaagttggcggtgctactgtatttgttatgccagttgatgcattccatcaattttaattctataatacaatcatcaattagagatacttaaaatagtgtattaataagttattaacaattttgggttgcttgactgcgactagttcagatgccaatagatttgatttttgtggttctaaaaataatcacaaatcatggtcgctattgttgcagtaattagttgctctttggcaacctttttatataaaagcaaaagggagtttgtaatgaatggatgaacagcaacaattgacgaatgcatatcattcaaataaattatcgcatgcctatttatttgaaggtgatgatgcacaaacgatgaaacaagttgcgattaattttgcaaagcttattttatgtcaaacagatagtcaatgtgaaacaaaggttagtacatataatcatccagactttatgtatatatcaacaactgagaatgcaattaagaaagaacaagttgaacaacttgtgcgtcatatgaatcaacttcctatagaaagcacaaataaagtgtacatcattgaagactttgaaaagttaactgttcaaggggaaaacagtatcttgaaatttcttgaagaaccaccggacaatacgattgctattttattgtctacaaaacctgagcaaattttagacacaatccattcaaggtgtcagcatgtatatttcaagcctattgataaagaaaagtttataaatagattagttgaacaagacatgtctaagccagtagctgaaatgattagtacttatactacgcaaatagataatgcaatggctttaaatgaagaatttgatttattagcattaaggaaatcagttatacgttggtgtgaattgttgcttactaataagccaatggcacttataggtattattgatttattgaaacaggctaaaaataaaaaactgcaatctttaactattgcagctgtgaatggtttcttcgaagatatcatacatacaaaggtaaatgtagaggataaacaaatatatagtgatttaaaaaatgatattgatcaatatgcgcaaaagttgtcgtttaatcaattaattttgatgtttgatcaactgacggaagcacataagaaattgaatcaaaatgtaaatccaacgcttgtatttgaacaaatcgtaattaagggtgtgagttagatgccaaatgtaataggtgttcagtttcaaaaagcgggaaaattagaatattatacacctaatgatatacaagtagatatagaagactgggtagttgtcgaatctaaaagaggcatagagataggtattgttaaaaatccattaatggatattgctgaagaggatgttgtgttacctcttaaaaatattattcgcattgctgatgacaaagatattgataaatttaattgtaatgaacgagatgctgaaaatgcattaatactatgtaaagacattgtaagagaacaaggtttggacatgcgtttagtcaattgcgaatatacattagataaatcgaaagttatttttaattttacggcggatgatcgtattgattttagaaaattagtaaaaatattagcgcaacatttaaaaacacgtatcgagttgagacaaattggtgtaagggatgaagccaaattgcttggcggtatcggaccttgtggtaggtcgttatgttgttctacatttttaggggattttgaaccagtatcgattaagatggctaaggatcaaaatttatcattaaatccaactaaaatttctggtgcatgtggtcgtttgatgtgttgtttaaaatatgaaaatgactattatgaggaagtacgtgcacaattacctgatattggtgaagcaattgaaacgcctgatggtaacgggaaagtagttgctttaaatatattagacatttctatgcaggtgaagcttgagggacatgaacagccacttgaatataaattagaagaaatagaaactatgcattaaggaggcattattacatttggatcgcaatgaaatatttgaaaaaataatgcgtttagaaatgaatgtcaatcaactttcaaaggaaacttcagaattaaaggcacttgcagttgaattagtagaagaaaatgtagcgcttcaacttgaaaatgataatttgaaaaaggtgttgggcaatgatgaaccaactactattgatactgcgaattcaaaaccagcaaaagctgtgaaaaagccattaccaagtaaagataatttggctatattgtatggagaaggatttcatatttgtaaaggcgaattatttggaaaacatcgacatggtgaagattgtctgttctgtttagaagttttaagtgattaatcaagcacactcaaatagtgttataattataaatgaatatggtttggataagtctgagacaatgcatgtttcaggctttaattgtgtataaagttttggtgattgcataagagatggcggtactaaatgttattattaagtgtgcacgcagtatcattagttataaaatgtagctgttaaaagtcaaaaatacatcgaatgtagttaggcatataatataaaaagagttttcaattactcaatagaaaaaggttgtcttcataggagttaaaaatgttaaaagagaatgaacgatttgatcaactaatcaaagaagattttagtattattcaaaatgatgatgttttttcattttcaacggatgctttgttgttagggcattttacaaaacctagaacaaaagatattgtgttggacttatgttcaggcaatggggtgatacccttgttattgtttgcgaaacatccacgacatatagaaggtgttgagattcaaaaaacacttgtcgatatggcgcgacgcacatttcaattcaatgatgttgatgaatatttaacaatgcatcacatggatttgaaaaacgttactaaagtatttaaaccttcacaatatactttagtaacgtgtaatccgccttattttaaagagaatcagcaacaccaacatcaaaaagaagcacataagatagcgagacatgagattatgtgtacacttgaagattgcatgattgcagcccgtcatttattaaaagaaggtggcaggctaaacatggtacatcgtgcagagagactaatggatgtcttgtttgaaatgagaaaagtgaatattgaacctaagaaagtcgtttttatatatagtaaagtagggaaatcagcacaaacgatagtagtagaaggtcgaaaaggtggaaatcaaggtttagaaatcatgcccccattttatatttataatgaagatggtaattatagcgaagaaatgaaggaagtatattatggatagtcattttgtatatattgtaaaatgtagtgatggaagtttatatacaggatacgctaaagacgttaatgcacgtgttgaaaaacataaccgaggtcaaggagccaaatatacgaaagtaagacgtccggtgcatttagtttatcaagaaatgtatgagacaaagtctgaagcattgaagcgtgaatatgaaattaaaacttataccagacaaaagaaattgcgattaattaaggagcgatagtatggctgtattatatttagtgggcacaccaattggtaatttagcagatattacttatagagcagttgatgtattgaaacgtgttgatatgattgcttgtgaagacactagagtaactagtaagctgtgtaatcattatgatattccaactccattaaagtcatatcacgaacataacaaggataagcagactgcttttatcattgaacagttagaattaggtcttgacgttgcgctcgtatctgatgctggattgcccttaattagtgatcctggatacgaattagtagtggcagccagagaagctaatattaaagtagagactgtgcctggacctaatgctgggctgacggctttgatggctagtggattaccttcatatgtatatacatttttaggatttttgccacgaaaagagaaagaaaaaagtgctgtattagagcaacgtatgcatgaaaatagcacattaattatatacgaatcaccgcatcgtgtgacagatacattaaaaacaattgcaaagatagatgcaacacgacaagtatcactagggcgtgaattaactaagaagttcgaacaaattgtaactgatgatgtaacacaattacaagcattgattcagcaaggcgatgtaccattgaaaggcgaattcgttatcttaattgaaggtgctaaagcgaacaatgagatatcgtggtttgatgatttatctatcaatgagcatgttgatcattatattcaaacttcacagatgaaaccaaaacaagctattaaaaaagttgctgaagaacgacaacttaaaacgaatgaagtatataatatttatcatcaaataagttaatcactttatcgattatatgaaattttaaacgattttataaacgcaagctgtaattttaaatggtaagttatcattttgcattgatactgataaaatgatgttgactatgataaaaaaatgatgacatcgacgttttttaatgtaaaataaatacattgaaagtaataaataccttaacattgaataagatgaaaatgagatgacgagataaatgttcgcgtccgttgaaatgcatagaaatcttagatattatttgaagtgagacattacgaggaggaacagttatggctaaagaaacattttatataacaaccccaatatactatcctagtgggaatttacatataggacatgcatattctacagtggctggagatgttattgcaagatataagagaatgcaaggatatgatgttcgttatttgactggaacggatgaacacggtcaaaaaattcaagaaaaagctcaaaaagctggtaagacagaaattgaatatttggatgagatgattgctggaattaaacaattgtgggctaagcttgaaatttcaaatgatgattttatcagaacaactgaagaacgtcataaacatgtcgttgagcaagtgtttgaacgtttattaaagcaaggtgatatctatttaggtgaatatgaaggttggtattctgttccggatgaaacatactatacagagtcacaattagtagacccacaatacgaaaacggtaaaattattggtggcaaaagtccagattctggacacgaagttgaactagttaaagaagaaagttatttctttaatattagtaaatatacagaccgtttattagagttctatgaccaaaatccagattttatacaaccaccatcaagaaaaaatgaaatgattaacaacttcattaaaccaggacttgctgatttagctgtttctcgtacatcatttaactggggtgtccatgttccgtctaatccaaaacatgttgtttatgtttggattgatgcgttagttaactatatttcagcattaggctatttatcagatgatgagtcactatttaacaaatactggccagcagatattcatttaatggctaaggaaattgtgcgattccactcaattatttggcctattttattgatggcattagacttaccgttacctaaaaaagtctttgcacatggttggattttgatgaaagatggaaaaatgagtaaatctaaaggtaatgttgtagaccctaatattttaattgatcgctatggtttagatgctacacgttattatctaatgcgtgaattaccatttggttcagatggcgtatttacacctgaagcatttgttgagcgtacaaatttcgatctagcaaatgacttaggtaacttagtaaaccgtacgatttctatggttaataagtactttgatggcgaattaccagcgtatcaaggtccacttcatgaattagatgaagaaatggaagctatggctttagaaacagtgaaaagctacactgaaagcatggaaagtttgcaattttctgtggcattatctacggtatggaagtttataagtagaacgaataagtatattgacgaaacaacgccttgggtattagctaaggacgatagccaaaaagatatgttaggcaatgtaatggctcacttagttgaaaatattcgttatgcagctgtattattacgtccattcttaacacatgcgccgaaagagatttttgaacaattgaacataaacaatcctcaatttatggaatttagtagtttagagcaatatggtgtgcttactgagtcaattatggttactgggcaacctaaacctattttcccaagattggatagcgaagcggaaattgcatatatcaaagaatcaatgcaaccgcctgctactgaagaggaaaaagaagagattcctagcaaacctcaaattgatattaaagactttgataaagttgaaattaaggcagcaacgattattgatgctgaacatgttaagaagtcagataagcttttaaaaattcaagtagacttagattctgaacaaagacaaattgtatcaggaattgccaaattctatacaccagatgatattattggtaaaaaagtagcagttgttactaacctgaaaccagctaaattaatgggacaaaaatctgaaggtatgatattatctgctgaaaaagatggtgtattaaccttagtaagtttaccaagtgcaattccaaatggtgcagtgattaaataactgtatttttaaaaattaggagagataattatgttaatcgatacacatgtccatttaaatgatgagcaatacgatgatgatttgagtgaagtgattacacgtgctagagaagcaggtgttgatcgtatgtttgtagttggttttaacaaatcgacaattgaacgcgcgatgaaattaatcgatgagtatgattttttatatggcattatcggttggcatccagttgacgcaattgattttacagaagaacacttggaatggattgaatctttagctcagcatccaaaagtgattggtattggtgaaatgggattagattatcactgggataaatctcctgcagatgttcaaaaggaagtttttagaaagcaaattgctttagctaagcgtttgaagttaccaattatcattcataaccgtgaagcaactcaagactgtatcgatatcttattggaggagcatgctgaagaggtaggcgggattatgcatagctttagtggttctccagaaattgcagatattgtaactaataagctgaatttttatatttcattaggaggacctgtgacatttaaaaatgctaaacagcctaaagaagttgctaagcatgtgtcaatggagcgtttgctagttgaaaccgatgcaccgtatctttcgccacatccgtatagagggaagcgaaatgaaccggcgagagtaactttagtagctgaacaaattgctgaattaaaaggcttatcttatgaagaagtgtgcgaacaaacaactaaaaatgcagagaaattgtttaatttaaattcataaagttaaaagtgagaaagatcaccgccataaatgtaaacgatgctatattcgtttaatatgctatggttctttctcacttttttaaattaaaatatcgtgcatgtgcaatacgtacgatagagatggttagagctttgaaattaagaattgtaggaaggcgttttaaatgaaaatcaatgagtttatagttgtagaaggacgagatgatactgagcgtgttaaacgagctgttgaatgtgatacgattgaaacgaatggtagtgccatcaacgaacaaactttagaagtaattagaaatgctcaacaaagtcgaggcgttattgtattaacagatccagatttcccaggagataaaattagaagtacaattactgaacatgtcaaaggtgttaaacatgcgtatattgatagagaaaaagctaaaaataaaaaagggaaaattggtgttgaacatgccgacttaattgatattaaagaagcgttaatgcatgttagttcaccctttgatgaagcttatgaatcaattgataaatctgtgcttatagagttggggttaattgttgggaaagatgcaaggcgccgtagagaaattttaagtagaaaattgcgaatcggccattccaatggtaagcagttattgaaaaagttaaatgcatttggttataccgaagcggatgtaaggcaagctttagaagatgaatgaggaagtgaaaatgttggataataaagatattgcaacaccatcaagaacgcgagcgttgttagataaatatggctttaattttaaaaaaagtttaggacagaactttttgatagatgtgaatatcattaataatatcattgatgcaagtgatattgatgcacaaactggggtgattgaaattggtccaggtatggggtcgttgacagaacaattggccagacatgctaaaagagtattggcatttgaaattgatcaacgtttaatacctgtattaaatgatacactatcaccttatgataatgtgacggtgattaatgaagatattttaaaagcgaatattaaagaagctgttgaaaatcatttacaagattgtgaaaaaataatggttgttgcaaacctgccgtactatattacgacgccaattttattaaatttgatgcaacaagatataccaattgatggctacgtggtgatgatgcaaaaagaagtgggcgaacgcttaaatgctgaagtaggttcaaaagcatatggttcattatcaattgtcgtacaatactatacagagactagtaaagtattaacggtacctaaatctgtatttatgccaccacctaatgttgattcaatagttgtaaaactgatgcagagaactgaaccgttagtaacagtagataacgaggaagcattctttaagttagcaaaagcagcatttgcacaaagaagaaagacaattaacaataactatcaaaattattttaaagatggtaaacaacacaaagaagtgattttacaatggttggaacaagcaggtattgatccaagacgtcgcggtgaaacgctatctattcaagattttgctaaattgtatgaagaaaagaaaaaaattccctcaattagaaaattaaatgattgacaaagcaaagcactattgttaaaatttaaattttgtttgacgaaaacgctgcaaatatggtattatgtaacttgtagcgaggtggagcaatatgccaaaatcaattttggacatcaaaaattctattgattgtcatgtaggaaatcgtattgtactgaaagccaatggaggccgtaagaaaacaataaaacgttctggaattttaaaagaaacatatccgtcagttttcattgttgagttagatcaagacaaacacaactttgagagagtatcttatacatacactgatgtgttaactgaaaatgttcaagtttcatttgaagaggataatcatcacgaatcaattgcacactaaataagacatatagagatgttagacgtttcttagtataagaagtaaatattatgataattatttgagtgttgggcattatgttcaatactctttttatttacaaaatgtttaacactgatgtttcgcttatagatttttcagtaaatggataattgtatttataaacacaaatacaagtaaatactaagtaattagatggagaaaattacttttttattaaaaaaacactaaaaaacaaattaaaatgtcaaatattaattctctttatgttaaaatcatcatattaagataacgaaaagagggcggaaaatgatatatgaaacggcaccagccaaaattaattttacgctcgatacactttttaaaagaaatgatggctatcatgagattgaaatgataatgacaacagttgatttaaatgatcgtttaacttttcataaaagaaaagatcgaaagatagttgttgagattgaacataattatgtgccttctaatcataaaaatctcgcatatcgtgcagcgcaactatttattgagcaatatcaactaaagcaaggtgtaacaatttctatcgataaagaaatacctgtttctgctggcttagctggaggttcggctgatgcagcagcaacgttaagaggattgaatcgactttttgatataggggcgagtttggaagaattggctctactaggcagtaaaatcgggacagatattccgttttgtatttataataaaactgcactatgtactggaagaggagagaaaatcgagtttttaaataaaccaccttcagcttgggtgattcttgctaaaccaaacttaggcatatcatcaccagatatatttaagttgatcaatttagataagcgttacgacgtacatacgaaaatgtgttatgaggccttagaaaatcgagattatcaacaattatgtcaaagtttgtctaatcgattagagccaatttctgtttcaaaacacccacaaatcgataaattaaaaaataatatgttgaaaagtggtgcagatggtgcgttaatgagtggaagcggaccgactgtgtatgggctagcacgaaaagaaagccaagcaaaaaatatttataatgcagttaacggttgttgtaatgaagtgtacttagttagactattaggatagaagggttgaaaagatgagatataaacgaagcgagagaattgtttttatgacgcaatatttgatgaaccatccgaataaattgattccattaactttttttgtgaaaaaatttaaacaggcgaagtcttcaataagtgaagatgtccaaattataaaaaatacattccaaaaagaaaagttaggtacagtaattactactgctggcgcaagtggtggtgttacgtataaaccaatgatgagtaaagaagaggcgactgaagttgttaatgaggtcattactctattagaagagaaagaacgtttgttacctggcgggtatttatttttatcagatttggtaggtaatccatcgctactaaacaaagttggtaagttaattgccagtatttacatggaagaaaaattagatgctgttgttaccattgcgacaaaaggtatttcattggcaaatgcggttgctaatattttaaatttaccagtagtagtgattagaaaagacaacaaggtgactgaaggttctacagtttcaattaattacgtttcaggatcttcaagaaaaatagagacgatggtactttcgaagagaactttagcagaaaattcaaatgttttagttgtcgatgattttatgagggctggtggctctattaatggtgttatgaatttaatgaatgagtttaaagcccatgtaaaaggggtatcagtacttgtagaatcaaaagaagttaaacaaagattgattgaagattatacttccttagtgaaattatctgatgtagatgaatataatcaagagtttaacgtagaacctggcaacagtttatctaagttttcataaaaggagttttagtattatgaaaatcattaacacaacaagattaccggaagcacttggaccatattcgcatgcaacagttgtgaatggtatggtttatacttctggtcagattccattgaatgttgatggacatatcgtaagtgctgatgttcaagcacagacaaaacaagttttagaaaatttaaaggttgttttggaagaagcaggatctgatttgaattctgttgcgaaagcgaccattttcattaaagatatgaatgatttccaaaaaataaatgaagtgtatggtcaatattttaatgaacacaagccagcgcgtagttgtgtagaggttgcgcgtttgccaaaagatgtgaaagtagaaattgaattagtaagtaaaattaaggaattataattttcgattaatatgtttaatcaagcttctaaataaaacagagagatatatactataggggggctcactacatgaaagtgacagatgtaagacttagaaaaatacaaacagatggacgaatgaaagcactcgtttccattacattagatgaagctttcgtaattcatgatttacgtgtaattgaaggaaactctggcttgttcgttgcaatgccaagtaaacgtacaccagatggtgaattccgcgacatcgcgcatcctattaattcagatatgagacaagaaattcaagatgcagtgatgaaagtatatgatgaaacagatgaagtagtaccagataaaaacgctacatcagaagattcagaagaagcttaatcaattttatatttagcgatgtaatacatttgcaataagttgatttgatactgtcgataaagcataaagctttgtcggcagtttttttagtttgtattaatgttttttatttttaatgaaaggctaataaatatatacgttaacagattatgatgatatgaaaattattgattcattgctgataaaaattgcgtttgaatgatgctcgtatttttgaagtaagaaaaaagttgtttttaaaattacaacgaattaaaaacaatgccttttatatgttgaaagagtattgcagattaaattataataatgacgaagtgtaaaatttaatgggggttaatgttcatgcgaagacacgcgataattttggcagcaggtaaaggcacaagaatgaaatctaaaaagtataaagtgctacacgaggttgctgggaaacctatggtcgaacatgtattggaaagtgtgaaaggctctggtgtcgatcaagttgtaaccatcgtaggacatggtgctgaaagtgtaaaaggacatttaggcgagcgttctttatacagttttcaagaggaacaactcggtactgcgcatgcagtgcaaatggcgaaatcacacttagaagacaaggaaggtacgacaatcgttgtatgtggtgacacaccgctcatcacaaaggaaacattagaaacattgattgcgcatcacgaggatgctaatgctcaagcaactgtattatctgcatcgattcaacaaccatatggatacggaagaatcgttcgaaatgcgtcaggtcgtttagaacgcatagttgaagagaaagatgcaacgcaagctgaaaaggatattaatgaaattagttcaggtatttttgcgtttaataataaaacgttgtttgaaaaattaacacaagtgaaaaatgataatgcgcaaggtgaatattacctccctgatgtattgtcgttaattttaaatgatggcggcatcgtagaagtctatcgtaccaatgatgttgaagaaatcatgggtgtaaatgatcgtgtaatgcttagtcaggctgagaaggcgatgcaacgtcgcacgaatcattatcacatgctaaatggtgtgacaatcatcgatcctgacagcacttatattggtccagacgttacaattggtagtgatacagtcattgaaccaggcgtacgaattaatggtcgtacagaaattggcgaagatgttgttattggtcagtactctgaaattaacaatagtacgattgaaaatggtgcatgtattcaacagtctgttgttaatgatgctagcgtaggagcgaatactaaggtcggaccgtttgcgcaattgagaccaggcgcgcaattaggtgcagatgttaaggttggaaattttgtagaaattaaaaaagcagatcttaaagatggtgccaaggtttcacatttaagttatattggcgatgctgtaattggcgaacgtactaatattggttgcggaacgattacagttaactatgatggtgaaaataaatttaaaactatcgtcggcaaagattcatttgtaggttgcaatgttaatttagtagcacctgtaacaattggtgatgatgtattggtggcagctggttccacaatcacagatgacgtaccaaatgacagtttagctgtggcaagagcaagacaaacaacaaaagaaggatataggaaataatcatttacgtatttaaaatggctaggataaaaggataatcctatgtaatattaatgtaatctttatgatttaatgattcgcatagtaatggagttacattttatatataatagtaattgcgtaagtaaataattggaggactataaatgttaaataatgaatataagaattcgtcattaaagattttttcattgaaaggaaacgaagcattagcgcaagaagttgctgaccaagtaggaattgaactaggtaaatgttcagttaaacgttttagtgatggagaaattcaaattaatatcgaagagagtattcgtggttgtgacgtatttattattcaaccaacatcatatcctgtgaatctacatttaatggaattattaattatgattgatgcttgtaaacgtgcttctgcagcaacaatcaatattgtagtgccatattatggatatgcaagacaagatagaaaagcccgtagccgtgagccaatcactgctaaattagttgcaaacttaatcgaaacagctggcgcaactcgtatgattgcgttagacttacatgcaccacaaattcaaggattctttgatattccaattgaccacttaatgggtgtgccaattcttgctaaacatttcaaagatgatccgaatattaacccagaagaatgtgtcgttgtttcaccagaccatggcggtgttacacgtgcacgtaaattagctgacattttaaaaactccaattgcaattatagataaacgtcgtcctagaccaaatgttgctgaagtgatgaacattgttggtgagattgaaggacgtacggcaattattattgacgatattattgatacagcaggtacaatcactttagctgcacaagcattaaaagataaaggtgctaaagaagtatatgcttgttgtacacaccctgttttatcaggaccggctaaagaacgtatcgaaaattctgctataaaagaattaatcgtaacaaactcaattcatttagatgaagatcgcaaaccatctaacactaaagaattatctgttgctggtttaatcgcacaagctatcattcgtgtatacgaaagagaatcagttagcgtattatttgactaatatttaaaaggcgtttgacgaacatattccaaacgtgtataatagtttcgttcgtgattatacgaataaataaacacttgcaagcaacgatgatgttgatgggtaagtgaggtgctcgttttgagcaaaaatgaaaggtggaaatgagaatggcttcattaaagtcaatcatccgtcaaggtaaacaaacacgttcagatcttaaacaattaagaaaatctggtaaagtaccagcagtagtatacggttacggtactaaaaacgtgtcagttaaagttgatgaagtagaattcatcaaagttatccgtgaagtaggtcgtaacggtgttatcgaattaggcgttggttctaaaactatcaaagttatggttgcagactaccaattcgatccacttaaaaaccaaattactcacattgacttcttagcaatcaatatgagtgaagaacgtactgttgaagtaccagttcaattagttggtgaagcagtaggcgctaaagaaggcggcgtagttgaacaaccattattcaacttagaagtaactgctactccagacaatattccagaagcaatcgaagtagacattactgaattaaacattaacgacagcttaactgttgctgatgttaaagtaactggcgacttcaaaatcgaaaacgattcagctgaatcagtagtaacagtagttgctccaactgaagaaccaactgaagaagaaatcgaagctatggaaggcgaacaacaaactgaagaaccagaagttgttggcgaaagcaaagaagacgaagaaaaaactgaagagtaattttaatctgttacattaaagtttttatactttgtttaacaagcactgtgcttattttaatataagcatggtgctttttgtgttattataaagcttaattaaactttattactttgtactaaagtttaattaattttagtgagtaaaagacattaaactcaacaatgatacatcataaaaattttaatgtactcgattttaaaatacatacttactaagctaaagaataatgataattgatggcaatggcggaaaatggatgttgtcattataataataaatgaaacaattatgttggaggtaaacacgcatgaaatgtattgtagctctaggtaatataggtaaacgttttgaacttacaagacataatatcggctttgaagtcgttgattatattttagagaaaaataatttttcattagataaacaaaagtttaaaggtgcatatacaattgaacgaatgaacggcgataaagtgttatttatcgaaccaatgacaatgatgaatttgtcaggtgaagcagttgcaccgattatggattattacaatgttaatccagaagatttaattgtcttatatgatgatttagatttagaacaaggacaagttcgcttaagacaaaaaggaagtgcgggcggtcacaatggtatgaaatcaattattaaaatgcttggtacagaccaatttaaacgtattcgtattggtgtgggaagaccaacgaatggtatgacggtacctgattatgttttacaacgcttttcaaatgatgaaatggtaacgatggaaaaagttatcgaacacgcagcacgcgcaattgaaaagtttgttgaaacatcacgatttgaccatgttatgaatgaatttaatggtgaagtgaaataatgacaatattgacaacgcttataaaagaagataatcattttcaagaccttaatcaggtatttggacaagcaaacacactagtaactggtctttccccgtcagctaaagtgacgatgattgctgaaaaatatgcacaaagtaatcaacagttattattaattaccaataatttataccaagcagataaattagaaacagatttacttcaatttatagatgctgaagaattgtataagtatcctgtgcaagatattatgaccgaagagttttcaacacaaagccctcaactgatgagtgaacgtattagaactttaactgcgttagctcaaggtaagaaagggttatttatcgttcctttaaatggtttgaaaaagtggttaactcctgttgaaatgtggcaaaatcaccaaatgacattgcgtgttggtgaggatatcgatgtggaccaatttcttaacaaattagttaatatggggtacaaacgggaatccgtggtatcgcatattggtgaattctcattgcgaggaggtattatcgatatctttccgctaattggggaaccaatcagaattgagctatttgataccgaaattgattctattcgggattttgatgttgaaacgcagcgttccaaagataatgttgaagaagtcgatatcacaactgcaagtgattatatcattactgaagaagtgatcagccatcttaaagaagagttaaaaactgcatatgaaaatacaagacccaaaatagataaatcagtgcgcaatgatttgaaagaaacgtatgaaagctttaaattattcgaaagtacatactttgatcatcaaatactacgtcgcttagtagcgtttatgtatgaaacaccttcgacaattattgagtatttccaaaaagatgcaatcattgcagttgatgaatttaatcgtattaaagaaactgaagaaagtttaacagtagagtctgattcgtttattagcaatattattgaaagtggtaatggatttataggacaaagttttataaaatatgatgattttgaaacattgattgaaggctatcctgtcacttatttttcattattcgctacaacaatgccgataaaactaaatcatattattaaattttcatgtaaacctgtccaacaattttatgggcaatatgacattatgcgttctgaatttcaacgatatgtcaatcaaaattatcatatcgtggttttggtcgaaactgaaactaaagttgaacgtatgcaagcgatgttaagtgaaatgcatattccatcaataacaaaattgcatcgctcaatgtcatcggggcaagcagtgattattgaaggcagtttatctgaaggatttgaactacctgatatgggattagttgtcattactgagcgtgagctttttaaatcaaaacagaaaaagcaacgaaaacgtacgaaagctatctcaaatgctgaaaaaattaagtcttaccaagatttaaatgtgggagattatattgttcatgtgcatcatggtgttggtagatatttaggtgttgagacgctcgaagtggggcaaacgcatcgggattatattaaattgcaatataaaggtacggatcaactatttgttccagtagatcaaatggatcaagttcaaaaatatgtagcttcggaagataagacgccaaaattaaataaactcggtggcagtgaatggaaaaaaacaaaagctaaagttcaacaaagtgttgaagatattgctgaagagttgattgatttatataaagaaagagaaatggcagaaggttatcaatatggggaagacacagctgagcaaacaacatttgaattagattttccatatgaacttacgcctgaccaagctaaatctatcgatgaaattaaagatgacatgcaaaaatcgcgtccaatggatcgcttgctatgtggtgatgttggttatggtaaaactgaagttgcagtgagagcagcattcaaagctgtaatggaaggaaagcaagttgcatttttagttcctacaactattttagctcagcaacattatgagacgttaattgagcgtatgcaagattttcctgttgaaattcaattaatgagtcgttttagaacgccaaaagagataaaacaaactaaggaaggacttaaaactgggtttgttgacatagttgttggtacacacaaattacttagtaaagatatacagtataaagatttagggctgttgattgtagatgaagaacaacgatttggtgtacgccataaagagcgtattaaaacattaaaacataatgtagatgtactaacattgactgcaaccccaatacctagaacattgcatatgagtatgctaggtgtgcgcgatttgtcagtgattgaaacgccgccagaaaatcgtttcccagttcaaacatatgtattagaacagaacatgagttttatcaaagaagctttagaaagagaactatcccgtgatggccaagtgttttatctttataataaagtgcaatccatttatgaaaaacgagaacaactccagatgttaatgccagatgctaacattgcagttgctcatggacaaatgacagagcgcgatttagaagaaacgatgttaagttttatcaataatgaatatgatattttagtaacgacgacgattattgaaacaggtgtcgatgtcccaaatgcaaatactttgatcattgaagatgcagatcgctttggattgagtcagttgtatcaattaagaggtcgtgttggtcgttcaagtcgtattggttatgcatacttcttacatccagcaaataaggtactaactgagactgcagaagatcgattacaagcgattaaagaatttacggagttaggctcaggatttaagattgcgatgcgtgatttgaacattcgtggtgctggtaatttgttaggtaaacaacagcacggctttattgatacagttggatttgatttgtacagtcaaatgttagaagaagctgtaaatgaaaaacgtggtattaaggaaccagaatctgaggtgccagaagtcgaagttgatttaaacttggatgcatatttgccaacagaatatattgcaaatgaacaagctaaaattgaaatttataaaaagctacgaaaaactgaaacatttgatcaaattatcgacattaaagatgaattaattgatcgttttaatgattatcctgttgaagtagcacgtttgcttgatatagtggaaataaaagtacacgcattacattcaggtatcacgttgattaaagataaagggaaaataattgatattcatttatctgtaaaagccactgaaaatattgatggcgaagtgctgttcaaagcaacacaacctttaggtagaacaatgaaggttggtgttcaaaataatgcaatgacaattactttaacgaaacaaaatcaatggcttgatagtttgaagtttttagttaagtgcattgaagaaagtatgagaatcagtgatgaagcataaagaagcatttaatggcgttgtcgtgttaactgctgcattaattgtcattaaaattctgagtgctgtataccgaattccatatcaaaatatattaggcgatacaggtttgtatgcatatcaacaagtgtatccaattgtagcattaggaatgatattatcgatgaatgccattcctagtgcaattacacaaaatataggaaagtatcatagtgacgaagcatatgcaaaagcagtcgcttatatacaattagttggtatattaatatttattgctatttttgtgtttgcgaacaatattgcacatatgatgggtgatggccatttaacaccaatgattcaagctgcaagtttaagctttatatttataggtatgcttggcgtgttaagaggttattatcaatctgcaaataatatgacagttccggctatttcccaggttatagaacaagttatacgagtaggtattatcattgttactattgttatttttgtagacagaggttggacgatatatgaagcgggaacaattgctattttagcatcaacgataggttttttaggttcttcaatttatttagtagcgcaccgaccttttaagtttaaaatggtaaataacactgcaaagattgtttggaaacagttcgcactttcggttttgattttcgctatcagtcaattaatcgtaattttatggcaagtgattgatagtgttactattattaagtcacttcaagcgatacgcgtgccattcgatgttgccataactgaaaaaggagtctatgaccgtggtgcatcatttattcagatgggattgattgtaactacaacatttagttttgcgctcattcctctgttaagtgacgcaatcaaaatgaataatcaggtacttatgaatcgttatgcaaatgcgtcattaaagattacgattttaataagtacagcagcgggaataggattaattaatttattgcctttaatgaacggtgtgttttttaagacgaatgatttaaccttaacgttaagtgtttatatgattacggtcatttgtgtatcgttaattatgatggatatggctttattacaagcgcaacatgctgtgagacctatttttgttggtatgacggcaggattggttattaaatttatacttaatatcattttgattcgtttaagtggcattattggtgcgagcattagtactgttgtatcattaattatattcggtacgattatccatattgctgtcacgagaaaataccacttacatgcgatgagacgattttttatcaatgttgttttaggtatggtatttatgtcgattgttgttcaatgcgtgttaaacatagtgacaacacacggtagattcactggactcattgaattattatgtgcagcagtattaggtatcattgcattgtttttctatatttttagatttaatgttttgacatataaagagttaacttatttaccatttggttcaaagttgtatcaaattaagaaaggaagacgttgatggcacataccattacgattgttggcttaggaaactatggcattgatgatttgccgctagggatatataaatttttaaagacacaagataaagtttatgcaagaacgttagatcatccagttatagaatcattgcaagatgaattaacatttcagagttttgaccatgtttatgaagcacatgaccaatttgaagatgtctataatgatattgtggcgcaattggttgaagctgctaatgaaaaagatattgtctatgcggttccgggtcatcctagagttgctgagacaactacagtgaaattactggctttagcaaaggacaatactgatatagatgtgaaagttttaggtggtaaaagttttattgatgatgtgtttgaagcagttaatgtagatccaaatgatggcttcacactgttagatgcgacatcattacaagaagtaacacttaatgttagaacgcatacattgattacgcaagtttatagtgcaatggttgctgctaatttgaaaatcactttaatggaacgatatcctgatgattaccctgttcaaattgtcactggtgcacgaagcgatggtgcggataacgttgtgacatgcccattatatgaattggatcatgatgaaaatgcattcaataatttgacgagtgtattcgtaccaaaaatcataacatcgacatatttgtatcatgactttgattttgcaacggaagtgattgatactttagttgatgaagataaaggttgtccatgggataaagtgcaaacgcatgaaacgcttaagcgttatttacttgaagaaacatttgaattgttcgaagctattgacaatgaagatgattggcatatgattgaagaactaggagatattttattacaagtgttattgcatactagtattggtaaaaaagaagggtatatcgacattaaagaagtgattacaagtcttaatgctaaaatgattcgtagacacccacacatatttggtgatgccaatgctgaaactatcgatgacttaaaagaaatttggtctaaggcgaaagatgctgaaggtaaacagccaagagttaaatttgaaaaagtatttgcagagcattttttaaatttatatgagaagacgaaggataagtcatttgatgaggccgcgttaaagcagtggctagaaaaaggggagagtaatacatgagattagataaatatttaaaagtatcacggttaataaagcgacgtacgctagcaaaagaagtaagtgatcaaggtagaattacaataaatggtaatgttgctaaagctggatcggatgttaaagttgaagatgtgctgacgattcgctttggtcaaaaattagtaacagttaaagtaactgcattaaatgaacatgcatctaaagataacgcaaagggcatgtatgaaatcattgaagagcgtcgacttgaagaagcgtaaattggaggtgacaagcaatgaaaaataaagtagaacatatagaaaatcagtacacgtcgcaagagaacaagaaaaaacaacgtcaaaaaatgaaaatgcgtgttgttcgtaggcgtattacagtatttgcgggcgtattacttgcgataattgttgttttatcaatcttgcttgttgtccaaaaacatcgcaatgatatcgatgcacaggagcgaaaagcgaaagaagcacagtttcaaaagcaacaaaatgaagaaattgcgttaaaagaaaagttgaataatctgaatgacaaagattatattgaaaaaattgcgcgtgatgattattacttaagcaacaaaggtgaagtgatttttaggttgccagaagacaaagattcgtctagctcaaaatcttcgaaaaaataaatccaaattgattcaaaattatccgagtatagacattgtgaaaaaatccaaacaaggatataataagggaaaatcgaatcaaatcgggaggatttatttaacatatgtcaatcgaagttggaaataagcttaaaggtaaagtcactggtattaaaaagtttggtgcattcgtagaattacctgaaggaaaaagtggtttagttcacattagtgaagtcgcagataattatgttgaaaacgtagaagagcacctttctgttggtgatgaagtagacgtaaaagtattatctattgctgatgatggaaaaattagtctttcaattaagaaagctaaagaccgtccacgtagacaacatacgagtaaaccaagtcatcaaaaaccagtgcaaaaagccgaagattttgaaaagaaattaagcaatttcttaaaagatagtgaagataaattaacttcaatcaaacgtcaaacagaatctagacgcggtggcaaaggttcaagacgttaattaaaataaataaagactgtttcgataaggaatatatttagaatgatgcgtatcgaataatcgattgcagcgttagacaatctaagactgtttcttaaataaggagcagtctcttttatttgtaatgatataactaaggcttataccatttttgaaaattgtaaaagtgaggtgatgttatgcagttaaatagtaatggttggcatgttgatgaccatattgttgtcgctgtttctacaggtattgatagtatgtgtttattgtatcaactactaaatgattataaagataattatagaaaactaacatgcttacatgtcaatcatggcgttaggtcagcttcaatcgaggaagccagatttttagaagcatactgcgaacgtcatcacatcgatttacatatcaaaaagttagatttgtcgcatagtctcgaccgaaataacagcattcagaatgaagctcgaattaaacgttacgaatggtttgatgaaatgatgaatgtattagaagcggatgtattgctaacggcgcatcatttggacgatcaattagaaactattatgtatcgtatttttaatgggaaatcgacgcgtaataaactaggatttgatgagttatcgaagcgaaaaggttatcagatttatcgaccacttttagctgtctctaaaaaagaaataaaacaattccaagagagatatcatattccatattttgaagatgaatctaataaagataacaaatatgttagaaatgatattcgtaatagaattattccagctattgatgaaaataatcaacttaaagtatcgcatttattaaaattaaaacaatggcatgatgaacaatatgatattttgcaatattcagctaaacaatttattcaagaatttgtgaagtttgatgaaaagtcaaaatatttagaggtttctagacaagcttttaataacttaccaaactcattaaagatggttgtgttggattgcctattatcaaagtattatgagttgtttaatattagtgctaaaacatacgaagagtggtttaaacaatttagtagtaagaaagcacaattcagtattaatctcacggataaatggataattcaaatcgcatatggtaaattaataataatggctaaaaataatggcgatacatattttagagttcaaactattgaaaagccaggtaattatatttttaacaaatatcgattagagatacattctaatttaccaaaatgtttatttccgcttacagtgagaacacgacaaagtggcgatacatttaaactgaatgggcgcgatggttataagaaagtgaatcgcctgtttatagattgtaaagtgcaacagtgggttcgggatcaaatgccaatcgtattggataaacaacagcgcattattgcggtaggagatttatatcaacaacaaacaataaaacaatggattataattagtaaaaatggagatgaatagcgttatgcataatgatttgaaagaagtattgttaactgaagaagatattcaaaatatctgtaaggaattgggagcacaattaacaaaggattatcaaggtaaaccattagtatgcgtgggtatcttaaaaggctcagcaatgtttatgtcagatttaattaaacgaattgatacccatttatcaattgatttcatggatgtttctagttatcacggaggcactgagtcaactggtgaagttcaaatcattaaagatttaggttcttctattgaaaataaagacgtattaattattgaagatatcttagagactggtactacacttaagtcaattactgaattattacaatctagaaaagttaattcattagaaatagttactttattagataaaccaaaccgtcgtaaagcggacattgaagctaagtatgtaggtaaaaaaataccagatgaatttgttgttggttacggtttagattatcgtgaattataccgaaacttaccatatatcggtacgttaaaacctgaagtgtattcaaattaattttttaatcaatttcagttattattactatgcgtttgagaaataatagtgtagactcaaaaatatgaaaaatgtatttcatatatatttaattttagacaagacatatgtcttgaaaagttgaaaaatatagagattgataaaactaatacgggtgtgaatgacattgatgttaagctcaattactagcttataaaacatgtcatatgttacaatttttgttagttttattatgggaagtaggaggaaatgacgcatgcagaaagcttttcgcaatgtgctagttatcgtaataataggcgttattatttttggtctattttcatatttaaacggtaatggaaatatgccgaaacagcttacatataatcaatttactgagaagttggaaaaaggtgaccttaaaactttagaaatccaaccacaacaaaatgtctatatggtaagtggtaaaacgaaaaatgatgaagactattcatcaactattttatataacaacgaaaaagaattacaaaaaattactgatgctgctaaaaagcaaaacggtgtaaaattaacgattaaagaagaagaaaaacaaagtgcctttgtgagtatactttcaacattaattccagttgtagtcatagcgttattatttattttcttcctaagccaagcacaaggtggcggtagtggcggtcgtatgatgaactttggtaaatctaaagcaaaaatgtacgataataataaacgtcgtgttcgtttctctgatgtagcaggggcagatgaagaaaaacaagaattaattgaaattgttgatttcttgaaagataataaaaaattcaaagaaatgggatctaggattcctaaaggtgtcttacttgttggacctccaggtactggtaaaacattacttgctagagcggttgcaggtgaagctggcgcaccattcttctctattagtggttcagactttgtagagatgtttgttggtgttggtgcgagccgtgttcgtgacttattcgataatgctaagaaaaacgcgccttgtatcatctttatcgatgagattgatgctgttggtcgtcaacgtggtgcaggtgttggtggcggtcatgatgaacgtgaacaaaccctaaaccaattattagttgaaatggatggtttcggtgaaaatgaaggtatcattatgatagctgctacaaaccgtcctgatatccttgacccagccttattacgtccaggtcgttttgatagacaaattcaagttggtcgtccagatgtgaaaggccgtgaagcaattcttcatgttcatgctaaaaacaaaccacttgatgaaacggttgatttaaaagcaatttcacaacgtacacctggtttctcaggtgctgatttagagaacttattaaatgaagcatctttaattgctgtacgtgaaggtaaaaagaaaattgacatgagagatatcgaagaggcaacggatagagttatagccggacctgctaagaaatctcgagttatttctaagaaagaacgtaatattgttgctcatcacgaagctggtcatacaattatcggtatggtacttgatgaggcagaagtagtgcataaagttactattgttccacgtggacaagcaggtggttatgcaatgatgctacctaaacaagatcgtttcttaatgactgaacaagagttattagataaaatctgtggtttacttggtggacgtgtatcagaagatattaactttaacgaagtatcaacaggtgcttcaaatgacttcgaacgtgcaacacaaatcgcacgctcaatggttacgcaatatggtatgagtaaaaaattagggccattacagttcggtcatagcaatggtcaagtattcttaggtaaagatatgcaaggtgagcctaattattcaagccaaatcgcatatgaaattgataaagaagttcaacgaatcgttaaagaacaatacgaacgttgtaaacaaattttattagagcacaaagaacaattaattttaattgctgaaacattattaacagaagaaacattagttgctgaacaaattcaatcattattctacgaaggtaaattacctgaaattgattatgatgcagctaaagttgttaaagatgaagattctgaatttaatgatggtaaattcggtaaatcttatgaagagattcgtaaagagcaattagaagatggacaacgtgacgaaagtgaagatcgtaaagaagaaaaagatattgctgaggataaaaaagaagctgataaatctgatgaaaaagatgaaccagcacatcgacaagccccaaatatcgaaaaaccttacgatccaaatcacccagacaataaataatcgattatattcagtacctctttctatgataaagttatagaaagaggtacttttatcgtttttaaaaatacgtattagattttaagtcattgaattgttatagcagaaaataattgtaaaacaagttacttcattatttagaatgatgggtgtagaataagtacaattgttgcattttatgaagtaaagtaattttaaaatatagagtaatagaggagattgaaataatgacacacgattatattgttaaagcattagcatttgatggggagattagggcttatgctgctttgacaactgaaactgttcaagaagcacaaacgagacattatacatggccgacagcatctgctgcaatgggaagaacaatgacagcaacagctatgatgggcgcaatgttgaaaggtgatcaaaaattaactgtcactgtagatggccaaggacctattggacgaattattgccgatgcaaatgctaaaggcgaggtgcgtgcttatgtagaccatccacaaactcattttccattaaatgagcaaggtaaacttgatgtaagacgagcagtagggacaaatggatctattatggttgttaaagacgttggaatgaaagactatttctctggagcaagtccaattgtttcaggagaacttggtgaagattttacttattattatgctacaagtgaacaaacaccttcatcggtaggtcttggtgtattggtaaatcctgataatacgattaaagcagcaggaggatttatcattcaagttatgccaggtgccaaagatgaaacaatttcaaaattagaaaaagcaattagtgaaatgacaccagtttctaaattaattgaacaaggattaacgccagaaggattactaaacgaaatcttaggtgaagaccatgtgcaaattttagagaaaatgcctgttcaatttgaatgtaattgtagtcatgagaaatttttaaatactattaaaggattgggcgaggctgagattcaaaatatgattaaagaagatcatggtgctgaagcagtatgtcatttctgtggaaataaatataaatatactgaagaagaattaaacgtgttgctagaaagtttagcgtaatttaatttaaatcaatacgctaaaatgtttatttttagcggtttagtgaaatgtagaactaaatagttgtataatccttagtgattttgtttgctttctagaatttatttgataaaataattctatatccgataaataaactaagatttcaacaactaactaaaaaggagtgttcttaatggcacaaaaaccagtagataatattactcaaattattggcggtacaccggtagtcaaattgagaaatgtagtagatgacaatgcagcagatgtttatgtaaaattggaatatcaaaatccaggtggttctgtaaaggatagaattgctttagcaatgattgaaaaagcagagcgagaaggcaaaattaaacctggcgatacaattgtagaaccaacaagtggtaatacaggtatcggtttagcatttgtatgtgctgctaaaggatataaagcagtatttactatgcccgaaacaatgagccaagagcgtcgtaatttattaaaagcatacggtgcggaattagttttaacgcctggatcagaagcgatgaaaggtgcaattaaaaaagctaaagaattgaaagaagaacatggttacttcgagccacaacaatttgaaaaccctgcgaaccctgaagttcatgagttaactacaggtcctgagttattacaacaatttgaagggaaaactatcgatgcgttcctagctggtgttggtactggtggtacgttatctggtgtaggtaaagttctgaaaaaagaatatcctaacatcgaaattgttgctatagagcctgaggcttctccagtattgagcggtggtgagccaggtccacataaattacaaggtttaggtgctggatttattccaggcactttgaatacagaaatctatgacagtattattaaagtaggaaatgatacagcgatggaaatgtctcgtcgagttgctaaagaggaaggtattttagcaggtatttcatcaggtgctgcgatttatgctgccattcaaaaagcaaaagaattaggaaaaggtaaaacagtagtaacagtattgccgagtaatggtgaacgctacttatcaacacctttatattcattcgatgactaattaatgtcatttaaaagagtgagttatctttttgagataacttgctctttttttctaccatgtatatttttaaaaatatgagcgttaaattaaacatttttctgataaaaatatccagtgaatgataagataataaacgtacatactaataactagtaaatagcaggagtaaattttattagagttaaacaatacataattaaagggtggttaacatgactaaaacaaaaattatgggcatattaaacgtcacacctgattcattctcagatggtggaaaatttaataatgttgaatcagctataaatagagtgaaagccatgatagatgaaggtgctgacattatagatgttggaggtgtttcaacgagaccaggtcatgaaatggtttcattagaagaagagatgaacagagtattacctgttgttgaagctattgtcggttttgatgtaaaaatttcagtcgatacatttcgaagtgaggttgctgaagcatgtttaaaattaggcgttgatatcattaatgatcaatgggctgggctgtatgatcatcatatgttccaaattgtagctaaatatgacgcggaaattattttaatgcataatggaaatggtaatcgtgatgaaccggttgtcgaagaaatgttaacatctttgttagcacaagcacatcaagctaaaatagctggtataccttcaaataaaatttggctagatccaggtataggtttcgctaaaactagaaatgaagaagccgaagttatggcaagactggatgaacttgttgcaacagaatatccagttttattagcgacaagccggaaacgtttcactaaagagatgatgggttatgatacaacaccggttgaaagagatgaagtaactgcagctacgactgcatatggtattatgaaaggcgttagagcagtacgcgttcataatgtcgagttgaatgctaaattagctaaaggtatagattttttaaaggagaatgaaaatgcaagacacaatctttcttaaaggtatgcgcttttatggatatcatggtgctttatcagctgaaaatgaaatagggcaaattttcaaagtggatgtaactttgaaagtagacttagctgaagctgggcgtactgataatgttattgatacagttcattatggtgaagtgttcgaagaggttaaatcaattatggaaggtaaggccgttaatttacttgagcatctagctgaacgtattgcaaatcgtataaattcacaatataatcgtgtaatggaaacgaaagtgagaatcactaaagaaaacccaccgattccgggtcattatgatggagtaggtatcgaaatagtgagggagaataaatgattcaagcatacttaggattaggtagtaatattggtgatagagaaagccagttaaacgatgctataaagattttgaatgaatatgatggtattaacgtatctaatatttctccgatttatgaaacagcaccagttgggtatactgagcaacctaactttttaaatttgtgtgttgaaattcaaacaacactcacagtattacaactgttggaatgttgtttgaagacagaagaatgtttacaccgtattagaaaggaacgatggggtcctagaactttagatgtggatattttgttgtatggagaagaaatgatagatttaccaaaactgtcggtgccacatccgagaatgaatgaacgtgcatttgttttaatcccattaaatgatatagcagcaaatgtcgtagaaccacgttcgaaattgaaagtgaaagatttagtttttgtcgatgacagtgtaaagagatataaataatgtattgttgagaacattcatatttattgggaatagatgattgattattggagatgtttccgcattttgattatctctaaatgcatttgatttcgaattagtatatgatgatttagtatgtgttagaattaagttatttcataaaatcaaagtaagcaatatttgataaattgctgtaatttatttgggcttttgttgaagtttgtggaagataatttttatacatttacttagggttgtattaatgataatcgtattttaaatgaataagtaattcataaacgaaaacagaaattgctttattacatttacaagctcttgtaaaattaaaaaagtgataaaattgatgttatgaatataagaaaacatgccacatcataactttaaggtgtaatggttaatgataaagtattagaaacatcgaaagagatgtatgttgagcaaaaatgtctgatattttataaaactttaaaggaaaatgtttgagtgtaccagttggaatactaaaggattacaacaagttaaaggagagaaagttatgtcagaagaaatgaatgaccaaatgttggttcgacgtcaaaaattacaagaattatatgatcttggtatagacccgtttggttctaaatttgaccgttcaggtttatctagtgatttgaaagaagagtgggaccagtattctaaagaagaattggtagaaaaagaagcggatagtcatgtcgctatagctggacgattaatgactaagcgtggtaaaggtaaagcaggatttgcacacgttcaggacttagctggacaaattcaaatttacgttcgtaaagatcaagttggcgatgacgaatttgatttatggaaaaatgctgatttaggcgatatcgttggtgttgaaggtgtaatgttcaaaacaaatactggcgaattatcggttaaagcgaagaaattcacgctactaactaaatcattgcgaccattaccggataaattccacggtttacaggatattgaacagagatatcgtcaaagatatttagatttaattacgaacgaagatagcactcgtacatttattaatcgtagtaaaatcattcaagaaatgcgtaattatttaaataataaaggtttcttggaagtagaaacacctatgatgcaccaaattgctggtggcgcagctgctagaccatttgtaacacatcataatgcattagatgcaacgttatacatgcgtattgctattgagttgcatttaaaacgtttaattgtcggtggacttgaaaaagtatatgaaattggtagagtattccgtaatgaaggtgtatcaactagacataaccctgaattcacaatgattgaattatatgaagcatatgcagattatcatgacattatggatttaacagaatctatggtgagacatattgccaatgaagtattaggttctgcaaaagtacaatacaatggggaaacgattgatttagaatctgcttggactcgtttgcatattgttgatgctgtaaaagaagctactggtgtagatttttatgaagttaaaagtgatgaagaagctaaagctttagctaaagaacatggtattgaaattaaagatacaatgaaatatggtcatattttaaatgaattctttgagcaaaaagttgaagaaacacttattcagccaacgtttatctatggtcatccgactgaaatttcacctttaacgaagaaaaatcctgaagatcctagatttactgatcgtttcgaattgttcattgtaggtagagagcatgcaaatgcatttactgaattaaatgatcctattgatcaaaaaggtcgttttgaagcgcaacttgttgaaaaagcgcaaggtaatgatgaagcgcatgaaatggatgaagattacattgaagcgttagaatatggtatgcctccgacaggtggtcttggtatcggtattgacagattggttatgttattaactgattctccatcaatcagagacgtgttattattcccttatatgagacaaaaataaatgacgttgatgttagtaagagctctcgtgtatacaacatgtgtatgcgagggttttcttaattatggtaattagttcgtgtttgaatgtttttgatagtaatagttaacgatagtggtgccatttttgactgttaaacaaggtagttggctgatagatgaaaatgacgatacgtatatagagtagttcggatgagaaatgttaacgatagacattgagatatcttataacaaaaattgctatattagtataatttatcttaatcagctataaaagtactttaaaattgtatagaatgtgtatggttttgtacatatgtgtatgatagaatactaaaagtgttatgaattagagagcacgagaaatgtcagttttgaagaataaaaaagttgattaaaagtgttgactttatcaattgaatgaagtaatatataaaagtcgtcaaaaacagacgaaacacactaaaagctgatgtgacaaagtttacatcaaagtgtaaaattaactattgcaccttattaattaagcgtgtatcataaaaaagtaagttattttgtctggtgactatagcaaggaggtcacacctgttcccatgccgaacacagaagttaagctccttagcgtcgatggtagtcgaacttacgttccgctagagtagaacgttgccaggcaaatgacaaatcggagaattagctcagctgggagagcatctgccttacaagcagagggtcggcggttcgaacccgtcattctccaccatttattcttagatatagccggcctagctcaattggtagagcaactgacttgtaatcagtaggttgggggttcaagtcctctggccggcaccatcttttgagccattagctcagctggtagagcatctgacttttaatcagagggtcagaggttcgaatcctctatggctcattacgatttaatttttatatttagcaaaataatgcagaagtagttcagcggtagaatacaaccttgccaaggttggggtcgcgggttcgaatcccgtcttctgctccattattttgccggggtggcggaactggcagacgcacaggacttaaaatcctgcggtgagagatcaccgtaccggttcgattccggtcctcggcaccattttagcgcccgtagctcaattggatagagcgtttgactacggatcaagaggttatgggttcgactcctatcgggcgcgccatttttaaattaattgaataacgggaagtagctcagcttggtagagcacttggtttgggaccaaggggtcgcaggttcgaatcctgtcttcccgattacttcttaaattccattttatgggggcttagctcagctgggagagcgcctgctttgcacgcaggaggtcagcggttcgatcccgctagtctccaccatttattttttacacgatgaacattgaaaactgaatgacaatatgtcaacgttaattccaaaaaacgtaactataagttacaaacattatttagtatttatgagctaatcaaacatcataatttttatggagagtttgatcctggctcaggatgaacgctggcggcgtgcctaatacatgcaagtcgagcgaacggacgagaagcttgcttctctgatgttagcggcggacgggtgagtaacacgtggataacctacctataagactgggataacttcgggaaaccggagctaataccggataatattttgaaccgcatggttcaaaagtgaaagacggtcttgctgtcacttatagatggatccgcgctgcattagctagttggtaaggtaacggcttaccaaggcaacgatgcatagccgacctgagagggtgatcggccacactggaactgagacacggtccagactcctacgggaggcagcagtagggaatcttccgcaatgggcgaaagcctgacggagcaacgccgcgtgagtgatgaaggtcttcggatcgtaaaactctgttattagggaagaacatatgtgtaagtaactgtgcacatcttgacggtacctaatcagaaagccacggctaactacgtgccagcagccgcggtaatacgtaggtggcaagcgttatccggaattattgggcgtaaagcgcgcgtaggcggttttttaagtctgatgtgaaagcccacggctcaaccgtggagggtcattggaaactggaaaacttgagtgcagaagaggaaagtggaattccatgtgtagcggtgaaatgcgcagagatatggaggaacaccagtggcgaaggcgactttctggtctgtaactgacgctgatgtgcgaaagcgtggggatcaaacaggattagataccctggtagtccacgccgtaaacgatgagtgctaagtgttagggggtttccgccccttagtgctgcagctaacgcattaagcactccgcctggggagtacgaccgcaaggttgaaactcaaaggaattgacggggacccgcacaagcggtggagcatgtggtttaattcgaagcaacgcgaagaaccttaccaaatcttgacatcctttgacaactctagagatagagctttccccttcgggggacaaagtgacaggtggtgcatggttgtcgtcagctcgtgtcgtgagatgttgggttaagtcccgcaacgagcgcaacccttaagcttagttgccatcattaagttgggcactctaagttgactgccggtgacaaaccggaggaaggtggggatgacgtcaaatcatcatgccccttatgatttgggctacacacgtgctacaatggacaatacaaagggcagcgaaaccgcgaggtcaagcaaatcccataaagttgttctcagttcggattgtagtctgcaactcgactacatgaagctggaatcgctagtaatcgtagatcagcatgctacggtgaatacgttcccgggtcttgtacacaccgcccgtcacaccacgagagtttgtaacacccgaagccggtggagtaaccttttaggagctagccgtcgaaggtgggacaaatgattggggtgaagtcgtaacaaggtagccgtatcggaaggtgcggctggatcacctcctttctaaggatatattcggaacatcttcttcagaagatgcggaataacgtgacatattgtattcagttttgaatgtttatttaacattcaaatattttttggttaaagtgatattgcttttgaaaataaagcagtatgcgagcgcttgactaaaaagaaattgtacattgaaaactagataagtaagtaaaatatagattttaccaagcaaaaccgagtgaataaagagttttaaataagcttgaattcataagaaataatcgctagtgttcgaaagaacactcacaagattaataacgcgtttaaatctttttataaaagaacgtaacttcatgttaacgtttgacttataaaaatggtggaaacatagattaagttattaagggcgcacggtggatgccttggcactagaagccgatgaaggacgttactaacgacgatatgctttggggagctgtaagtaagctttgatccagagatttccgaatggggaaacccagcatgagttatgtcatgttatcgatatgtgaatacatagcatatcagaaggcacacccggagaactgaaacatcttagtacccggaggaagagaaagaaaattcgattcccttagtagcggcgagcgaaacgggaagagcccaaaccaacaagcttgcttgttggggttgtaggacactctatacggagttacaaaggacgacattagacgaatcatctggaaagatgaatcaaagaaggtaataatcctgtagtcgaaaatgttgtctctcttgagtggatcctgagtacgacggagcacgtgaaattccgtcggaatctgggaggaccatctcctaaggctaaatactctctagtgaccgatagtgaaccagtaccgtgagggaaaggtgaaaagcaccccggaaggggagtgaaatagaacctgaaaccgtgtgcttacaagtagtcagagcccgttaaygggtgatggcgtgccttttgtagaatgaaccggcgagttacgatttgatgcaaggttaagcagtaaatgtggagccgtagcgaaagcgagtctgaatagggcgtttagtatttggtcgtagacccgaaaccaggtgatctacccttggtcaggttgaagttcaggtaacactgaatggaggaccgaaccgacttacgttgaaaagtgagcggatgaactgagggtagcggagaaattccaatcgaacctggagatagctggttctctccgaaatagctttagggctagcctcaagtgatgattattggaggtagagcactgtttggacgaggggcccctctcgggttaccgaattcagacaaactccgaatgccaattaatttaacttgggagtcagaacatgggtgataaggtccgtgttcgaaagggaaacagcccagaccaccagctaaggtcccaaaatatatgttaagtggaaaaggatgtggcgttgcccagacaactaggatgttggcttagaagcagccatcatttaaagagtgcgtaatagctcactagtcgagtgacactgcgccgaaaatgtaccggggctaaacatattaccgaagctgtggattgtcctttggacaatggtaggagagcgttctaagggcgttgaagcatgatcgtaaggacatgtggagcgcttagaagtgagaatgccggtgtgagtagcgaaagacgggtgagaatcccgtccaccgattgactaaggtttccagaggaaggctcgtccgctctgggttagtcgggtcctaagctgaggccgacaggcgtaggcgatggataacaggttgatattcctgtaccacctataatcgttttaatcgatggggggacgcagtaggataggcgaagcgtgcgattggattgcacgtctaagcagtaaggctgagtattaggcaaatccggtactcgttaaggctgagctgtgatggggagaagacattgtgtcttcgagtcgttgatttcacactgccgagaaaagcctctagatagaaaataggtgcccgtaccgcaaaccgacacaggtagtcaagatgagaattctaaggtgagcgagcgaactctcgttaaggaactcggcaaaatgaccccgtaacttcgggagaaggggkgctctttagggttaacgcccagaagagccgcagtgaataggcccaagcgactgtttatcaaaaacacaggtctctgctaaaccgtaaggtgatgtataggggctgacgcctgcccggtgctggaaggttaagaggagtggttagcttctgcgaagctacgaatcgaagccccagtaaacggcggccgtaactataacggtcctaaggtagcgaaattccttgtcgggtaagttccgacccgcacgaaaggcgtaacgatttgggcactgtctcaacgagagactcggtgaaatcatagtacctgtgaagatgcaggttacccgcgacaggacggaaagaccccgtggagctttactgtagcctgatattgaaattcggcacagcttgtacaggataggtaggagcctttgaaacgtgagcgctagcttacgtggaggcgctggtgggatactaccctagctgtgttggctttctaacccgcaccacttatcgtggtgggagacagtgtcaggcgggcagtttgactggggcggtcgcctcctaaaaggtaacggaggcgctcaaaggttccctcagaatggttggaaatcattcatagagtgtaaaggcataagggagcttgactgcgagacctacaagtcgagcagggtcgaaagacggacttagtgatccggtggttccgcatggaagggccatcgctcaacggataaaagctaccccggggataacaggcttatctcccccaagagttcacatcgacggggaggtttggcacctcgatgtcggctcatcgcatcctggggctgtagtcggtcccaagggttgggctgttcgcccattaaagcggtacgcgagctgggttcagaacgtcgtgagacagttcggtccctatccgtcgtgggcgtaggaaatttgagaggagctgtccttagtacgagaggaccgggatggacatacctctggtgtaccagttgtcgtgccaacggcatagctgggtagctatgtgtggacgggataagtgctgaaagcatctaagcatgaagcccccctcaagatgagatttcccaacttcggttataagatccctcaaagatgatgaggttaataggttcgaggtggaagcatggtgacatgtggagctgacgaatactaatcgatcgaagacttaatcaaaataaatgttttgcgaagcaaaatcacttttacttactatctagttttgaatgtataaattacattcatatgtctggtgactatagcaaggaggtcacacctgttcccatgccgaacacagaagttaagctccttagcgtcgatggtagtcgaacttacgttccgctagagtagaacgttgccaggcaaaaatggatgcgatgagccgcattgagaccgtgaggtctctttttttatgtctaaaacgtcaaaataaaagttaacacaaagaaaatggcttgacgaagtgaaaacgtttgaatctgacgaaacgagaaaagagcgcaacgagtttagtagagctaaatgagtaagcgagagccgaagaagaggaaagaagcaagcgattgtcacaagtcaagaaaggttcttagcgaggatggtaaccaacttacgttccgctagagtagaactggaaatgataatttaataatgtacactttcgattgtctaagtatgtacaactttaattttgtgtttatataaatttaaaatgatatcatcgaaaacaaaatattgtataaatagagaagagcagtaagacggtatctaattgaaaatgatcttactgctcttttatatactttattgaaatacaaaaaggaaattaattattatacaatagacaagctattgcataagtaacactaacttttatcaaagaagtgttactttataattaatgattttattagagcgtctacatgcggttttaaagcatcatcgtctataccgccaaagcctaatataaatttaggggttttcttatagtcttgatcatcatcaaaattataaacttgtaattttaactttactttgtttgctctatcaagacactcttgtaatgttaatccattttttactgtaattgtaaaatgcatacccgtttcagcaccttgaatatcaagctgctctttgtaaggtttcaatctttttaaaatataggttagttttctacgataaattcgtctcattttatttaaatgcctttcaaaaccaccggaagatataaacgttgcaataaggttttgcatatgaacaggtacagtgttgccttcaatgtgattttgagaatgatattttttcattatagaatagggtaacaccatatatgcaactcgacagctaggaaaaatagactttgaaaatgtactgatataaatcactttttctcctcttgaatatagaccttgaattgctggaatgggtttgccgaaatatctaaactcggaatcataatcatcttctataataaatcgttcttctttttcttgagcccattgtattaattgagttcgcttttttaagtccatcacatatccagttggaaattgatgggaaggcgttatatatactatatttttttgtgatttaataacttcatctacgtttattccattatcttcaacttcaatttgttcatattcaacttgttttttatctaaaatatttttgattggtggataactaggtttttcgataataaatgttgaagtataaagtaaatcgactaattgatttactaattgttcggtagatgagccaattataatttgattaggatcacaaattacaccacgattagtaaataaataaaatgccagttgaaatcttaaatgtaattctccttgaaaatgtcctctacgtaattgatttaaatgatttgtatcataaagatctttggaatactttctgaaaagttctatcgggaaatgtttcgtatctatttcatccaaattaaaagcataatcataagcttcatcactcgcttttggtttatatgaatcatcatcaaaaagagaggggataggttgattgtttaaaattgttaaagattcaatttcggacacaaaatatccagagcgaggtcttgaataaatgtaaccttcgtctaatagaagttgatatgcatgctctacggttgtttggctgatagataaatgtttgcttaattgtcttttagaataaaatttatcgccttctttaaattgaccttcaattatttgtttttttaatttttcataaagttgatggtataaagtgtttttcaattttataactgacctcctaaatttatcttattttgtacctttttaaatatcagtttatacattacaatgtatttaatcaacttgaaaaggggttttatgtataatgagtaaaattattggatcagacagagtcaaaagaggtatggctgaaatgcaaaaaggcggcgttattatggatgtcgttaatgctgagcaagcaagaattgcagaagaagcaggcgcggtagcagttatggcattagaacgagtaccttctgatattagagctgctggtggcgttgcacgtatggcaaaccctaaaattgtagaagaagtaatgaatgctgtttctattccagtcatggctaaagcacgtattggtcatatcactgaagcaagagtattagaggcgatgggtgttgactatattgatgaatcagaagtgttaacaccagcagatgaggaatatcacttaagaaaagatcaatttacagtaccatttgtatgtggatgtcgtaatttaggtgaagctgcgcgtagaattggtgaaggtgctgctatgttacgtactaaaggtgaaccaggtacaggtaatattgttgaagctgtaagacatatgagacaagttaattcagaagttagtcgtttgactgtaatgaatgatgatgagattatgacttttgcgaaagatatcggtgcgccttatgaaattttaaaacaaattaaagacaatggtcgtttaccggtagttaactttgcagctggtggcgttgcgactcctcaagatgctgctttaatgatggaattaggtgccgacggtgtattcgttggatcaggtatttttaaatcagaagatccagaaaaatttgctaaagcaattgttcaagcaacaacacattaccaagactatgaactaattggaagattagcaagtgaacttggcactgctatgaaaggtttagatatcaatcaattatcattagaagaacgtatgcaagagcgtggttggtaagatatgaaaataggtgtattagcattacaaggtgcagtacgtgaacatattagacacattgaattaagtggtcatgaaggtattgcagttaaaaaagttgaacaattagaagaaatcgagggcttaatattacctggtggcgagtctacaacgttacgtcgattaatgaatttatatggatttaaagaggctttacaaaattcaactttacctatgtttggtacatgcgcaggattaatagttctagcgcaagatatagttggtgaagaaggataccttaacaagttgaatattactgtacaacgaaactcattcggtagacaagttgacagctttgaaacagaattagatattaaaggtatcgctacagatattgaaggtgtctttataagagcgccacatattgaaaaagtaggccaaggcgtagatatcctatgtaaggttaatgagaaaattgtagccgtccagcaaggtaaatatttaggcgtatcattccatcctgaattaacagatgactatagagtaactgattactttattaatcatattgtaaaaaaagcatagcttaatgtatgctaaaacaacgaattattgatatttatagatttgttgagaagacaatatctccttcaaacttagctttggaggagttgttttttatttcaaaataaaaaatgataaaaaataaagatatacataagaaaaaaccccttcaaagagactgagaatagtcaaaattttgaaggggttaattcgatgttgatgtatttgttaaataaagaatccagcgattgcagctgaaatgaaagatactagtgttgcaccgaataatagtttcaaaccaaagcgggcaactgtatctccttttttgtcattaagagatttaatcgcacctgaaataataccaatagagctaaagttagcaaatgatactaagaatacagatgtaacaccttttgcgtgttcagataaatcactaagtttaccaagtgcttgcattgctacaaattcgttagataatagttttgtcgccataactgaaccggcttgaactgcatcttgccatggcacaccgactaagaatgcaaatggtgcaaagacaaaaccaattaatgtttggaaatcccaagaaatagcgccacctgaaactgtactaaagatattgcttacaattccatttaatagagcgataatagcaatgtatccgattaacattgcgcctacaatgacagctactttaaatccatctaaaatatattctcctagcatttcgaagaatgattgttgtctttcttcagtttcttcaactaataatttgtcatcttcttcattaactttataagggttaataattgaagcgatgatgaaaccaccaaataagtttaagacaacagccgttacaacatatttaggttcaattaaggtaaagtatgcaccgataattgaagcagaaacagtcgacattgctgaagctgttaatgtgtataaacgttgcttaggtatgtatggtaattgttttttaattgaaataaatacttcagattgtcctaaaattgctgcagcaactgcattgtatgattctaaacgtcccataccattaattttagaaattaagaatcctaaaacattaatgattaaaggtaaaatctttgtgtattgaaggataccgataatcgctgaaataaatacgataggtaataatacactgaagaagaatggtggttgcttaggatcgatatattgaataccaccgaatacaaagttaacaccatctgctgcttttaataataagtagttaaaaccgtttgaaataccaccaataaccttgattcccattgtagttttaagcaagataaatgcaaagataagctgaattgcaagtaaaattcctacatatttccagcgaatatttttcctgtctgagctaaatagaaacgcaagtgctaaaaagaagataattccgataatcccaattagaatatgcatatatttctcattcctttagttttttctacaatctatcatacaataaaatggaagggctaacatcataaatttttgaaaatataaaaacaaattaattgaaaaaggtcaaaataggtcatataatatagtcaaagaaggtcaaaaaggggtgatatacatgcacaatatgtctgacatcatagaacaatacatcaaacgtttatttgaagagtcgaatgaagatgtcgttgaaattcagagagcgaatatcgcacagcgttttgattgcgtaccatcacaattaaattatgtaatcaaaacacgattcactaatgaacatggttatgaaatcgaaagtaaacgtggtggtggtggttacatccgaatcactaaaattgaaaataaagatgcaacaggttatattaatcatttgcttcagctgattggaccttctatttctcaacaacaagcttattatattattgatgggcttttagataaaatgttaataaatgaacgtgaagctaaaatgattcaagcagttattgatagagaaacgctatcaatggatatggtttctagagatattattagagcaaatattttaaaacgtttgttaccagttataaattattactaaatgaaatgaggtgttgaagtgctttgtgaaaattgtcaacttaatgaagcggaattaaaagttaaagttacaagtaaaaataaaacagaagaaaaaatggtgtgtcaaacttgtgctgaggggtaccatccgtggaatcaagctaatgaacaacctgaatatcaagaacatcaagataatttcgaagaagcatttgttgttaagcaaattttacaacatttagctacgaaacatggcattaattttcaagaagtagcgtttaaagaagaaaaacgttgcccatcatgtcatatgactttgaaagatattgcacatgttggtaaatttgggtgtgctaattgttatgcaacatttaaagatgacatcattgatatcgtccgcagagttcaaggtggacaatttgagcacgttggaaagacaccacattcttcacataaaaagatagctttaaagcgaaaaatcgaagaaaagaatgaatatttgaaaaaacttattgaaatccaagattttgaggaagcagccattgttagagatgaaattaaagcactaaaagctgagagtgaggtgcaacatgatgacgcataatattcatgataatatcagccaatggatgaaaagtaatgaagaaacaccaattgttatgtcttctagaattcggttagcgcgtaatttagaaaatcatgtgcatccactaatgtatgctactgaaaatgatggatttagagttataaatgaggtacaagatgccttgccaaattttgaattaatgcgtcttgatcaaatggatcaacaaagtaaaatgaaaatggttgcaaagcatttgattagtcctgaactaataaaacaaccagcagccgcagtattagtgaatgatgatgaatctttaagtgtcatgataaatgaagaggaccatattcgtattcaagctatgggaactgacacgacattacaggctttatataatcaagcttcatcaattgatgatgaattagatcgaagccttgatataagttatgatgaacaacttggttatttaactacatgtcctaccaatataggtactggtatgagagtaagcgtgatgctacatttaccaggtctatctattatgaaaagaatgacacggattgctcaaaccattaatcgttttggatatacaatcagaggtatttacggtgaaggttcgcaagtttatggacatacttatcaagtatccaaccaacttacacttggtaaatctgagttagaaatcatagaaacattaacagaagttgttaatcaaatcattcatgaagaaaaacaaatacgacaaaagttagacacttataatcaattagaaacacaagaccgtgtttttcgctcgctaggtattttacaaaactgtagaatgataactatggaagaggcttcttatagattaagcgaagttaaacttggtatagatttaaattacattgaattacaaaactttaaatttaatgaattgatggtagctatacagtcaccatttttattagatgaagaagatgacaaatctgtaaaagaaaaacgagcagatatactaagagaacatataaagtaggaggtcattatttatgttatttggtagattaactgagcgtgcacagcgcgtattagcacatgcacaagaagaagcaattcgtttaaatcattcaaatataggaacagaacacctattattggggttaatgaaagaacctgaaggaattgctgcaaaagtattagaaagttttaatatcactgaagataaagtaattgaagaagttgaaaaattaatcggacatggtcaagatcatgttggtacattgcattatacacctagagctaaaaaagtcattgaattatcgatggatgaagctagaaaattacatcacaattttgttggaacggaacatattttattaggcttgattcgtgaaaatgaaggtgttgcagcaagagtttttgcaaatctagatttaaatattactaaagcacgtgcacaagttgtgaaagctttaggaaaccctgaaatgagtaataaaaatgcacaagctagtaagtcaaataatactccaactttagatagtttagctcgtgacttaacagtcattgccaaagacggtacattagatcctgttataggacgtgataaagaaattacacgtgtaattgaagtattaagtagacgtacgaaaaacaatcctgtacttattggagagccaggtgttggtaaaactgctattgctgaaggtttagcgcaagccatagtgaataatgaggtaccagagacattaaaagataagcgtgttatgtctttagatatgggaacagtagttgcaggtactaaatatcgtggtgaatttgaagagcgtctgaaaaaggttatggaagaaatccaacaagcaggtaatgtcatcctatttattgatgagttgcatactttagttggtgctggtggtgctgaaggtgctatcgatgcttcgaatattttgaaaccggcattagcacgtggtgaattacaatgtattggtgctactacattagatgaatatcgcaaaaatattgaaaaagacgcggctttagaacgtcgtttccaacctgtacaagttgatgaaccttcagtagtagatacagttgctattttaaaaggattaagagatcgttacgaagcacaccatcgtattaatatttcagacgaagctattgaagcagctgttaaattaagtaacagatacgtttcagatcgtttcttaccagataaagcaattgatttaattgatgaagcaagttctaaagtaagacttaagagtcatacgacacctaataatttaaaagaaattgaacaagaaattgaaaaagttaaaaatgaaaaagatgctgcagtacatgctcaagagtttgaaaatgctgctaacctgcgtgataaacaaacaaaacttgaaaagcaatatgaagaagctaaaaatgaatggaagaatgcacaaaatggcatgtcaacttcattgtcagaagaagatattgctgaagttattgcaggatggacaggtatcccattaactaaaatcaatgaaacagaatctgaaaaacttcttagtctagaagatacattacatgagagagttattgggcaaaaagatgctgttaattcaatcagtaaagcggttagacgtgcccgtgcagggttaaaagatcctaaacgaccaattggtagctttatcttccttggaccaactggtgttggtaaaactgaattagctagagctttagctgaatcaatgtttggcgatgatgatgcgatgatccgtgtagacatgagtgaatttatggaaaaacacgcagtgagccgattagttggtgctcctccaggatatgttggtcatgatgatggtggacaattaactgaaaaagttagacgtaaaccatattctgtaattttatttgatgaaattgaaaaagctcatccagatgtatttaatattctattacaagttttagatgatggacatttgacagatacaaaaggacgtacagttgatttcagaaatacaattatcataatgacatcaaacgttggggcacaagaattacaagatcaacgatttgctggattcggtggttcaagtgatggacaagattatgaaacaattcgaaaaacgatgttaaaagaattaaaaaattcattccgtccagaatttttaaaccgtgtagatgatatcattgtattccataaactaacaaaagaagaattaaaagaaattgtaacaatgatggttaataaattaacaaatcgattatctgaacaaaacataaatattattgttactgataaagcgaaagacaaaatcgcagaagaaggatatgatccagaatatggtgcaagaccattaattagagcgatacaaaaaactatcgaagataatttaagtgaattaatattagatggtaatcaaattgaaggtaagaaagttacagtagatcatgatggtaaagagtttaaatatgacattgctgaacaaacttcagaaactaaaacaccatcgcaagcataattataaaacagtccaaaacaaattaaagttttgggctgtttttttagtagcattgaactatagaaattcgtgaaagtatccatcaacgaaacaatctataaaacaatcatcaaaggatagttaagaattatatgtaacaagttaatgagcctacagcgatagcataaaggtatgaatttttataaaggttttttgtttgaagatactagcaacttacgtcaaaataaaataggtctatataatattgtgataaatctagagaaaagagtttactaagaaattattaagattttatctttgaaagataccgactatcaacatgatgtaagtttattttataatattcataaaaaataaatctggtaaaacagtttgcgttagtagtcatgttaaaatacaaacaaatgtaactcacatttaatttgtcataatgggaatgtgcgtttaaaatagatttgttcaaaggaaagtggaggtgcaattttggccaagaaaaaagtgatttttgaatgtatggcttgtggttatcaatctcctaaatggatggggaaatgtcctaattgtggcgcttggaatcaaatggaggaaattgttgaaaaagcagccaatcctaaacatggagttaaaaccaaggaattagcaggtaaagtacaaaaattaaatagtattaaacatgaaacaacgccgagagtgttaacagattcagcagaattcaaccgtgtattaggtggaggtattgtgagcggatcgttagtacttattggtggggatccaggtattggtaagtcaacgttacttttacaaatttgtgcatcgttatctcaaaagaaaaaagtactatatattactggagaagaatcgcttagtcagactaaattacgtgcagagcgattagatgaagattcaagtgaattgcaagtattagctgaaacagatcttgaagttatttatcaaacagtaaaagaagaacaacctgatttattagtagtggattcgattcaaacaatatatcatcctgaaatcagctctgcgccaggttctgtttcacaagttcgtgaaagtacacaaagtttaatgaatattgctaaacaaatgaacattgcaacttttatagtgggtcatgtaacgaaagaaggtcaaattgctggcccaagattgctagaacacatggttgatactgtgctttattttgaaggcgatgaacaccacgcatatcgaattttgcgagctgttaaaaaccgttttggttcaacgaatgaaatgggaatcttcgaaatgaagcaaagtggattaaaaggtgtaaataatccatctgaaatgtttttagaagaacgttcaacaaatgttccaggttcaacaattgttgcaaccatggagggaaccagaccacttttaatagaagttcaagcgctggtaactccaacgacttttaacaatccgagacgaatggcaacagggattgatcataatcgattaagtttgttgatggctgttttggaaaagaaagaaaattatctattacaacaacaagatgcttatatcaaagtagctggcggtgtaaagttaacggagccagcagttgatttaagtgtaattgtagcaactgcatctagctttaaagataaagctgtcgacggattagattgctatattggagaagttggtttaacgggcgaggtacgtcgtgtatctcggatagaacaacgcgtgcaagaggctgcaaaactaggtttcaaacgtgtaattattcctaaaaataatataggcggatggacatatcctgaaggtatacaagtaataggtgtaactactgtacatgaagcattgtcatttgctcttcattcataaaacatcaagaaaggaggacattgtgtgaatatcgttaaactaatggttattattatttacttaattattgggagcgcattaggaataattattattcctgaaattgcaaatgatcttggattacaaaactccagctttttaaaaaatcactatgtagatggcattatcggtagtatttttatgttcttaatttttggtgtatttattagacgagttactaacgctataaaaggtttagaacattttattatgcgtagaagtgctgttgaaatactattcgcaacaataggtttaataatcggattacttatttctgttatggtgtcgtttatattagaatcaattggtaactctatttttaatcatttcattcctgtcataattacgatattactatgttatttcggtttccaatttggccttaaaaaacgagatgaaatgttaatgtttttacctgagaatatagcgcgttccatgtcacaacatactaaaagtgctacgccaaaaattatcgacacaagcgcaattattgatggtcgtattttagaagtcattcgttgcggttttatcgatggcaatattttaattccacaaggtgttattaatgaattacaaattgttgcagattcaaatgacagtgttaaacgtgaaaagggtaaaagaggcttagatattttaaatgaattgtatgatttagattatcctacaaaggttatacatccaactaaaacacatagtgatattgatacaatgctattaaagctagctaaacaatatcatgcaagtattattacgacagatttcaacctaaataaagtttgtcatgtacatggtatcaaagcattaaatgttaatgatttatcagaagcaatcaaacctaatgtacatcaaggtgatcaactgcatattttactgacaaaaatgggtaaagagcctggtcaggcagtaggatatctagatgatggtacgatggtggttgttgataatgctaaaaatcttattggcagtcatgtcaatttagaagtagtcagcttattgcaaacatcttcaggaagaattgtttttgctaaaaaaatcgaagatacagtatcattataaaaactgtagttgacgaaaacaaaatagatattaaaaggtatatgaaatggcgaagtttgtaatttgaagtataactataaataaatgcaaaacatattagttatcaaaaaatacaaatagtgctaatatatcattgaaacaagttcattaagtgttaaattttagatattaataaagttattcttatagcaatcaagacatacaaaattagaatcaattttaacgtatttgaatagttaatttgaagtttaatttcacagtacataatattcatttttaagtcgttgaaatgtttatgtagtgcagtcttgattcttagggatagcttttttaaagtgttgaaaaaacaactgctttctatttaaaatttaagcatattacccagggaattatgttatgattaaacaatgaaattattttaaggtcatgttaaaaagcattgtttcgttttaacaataagacgagttagacatttgttatgacggtcgaagatagcaaatgaacaatttatatgaactaacttgaaaatctgatatttaatttaggagtgaaaaaaatgagcgatcgtataagagtaagatatgcaccaagtccaactggttatcttcatattggtaatgcaagaacagcattattcaattacttgtatgctaaacattacaacggagattttgtgattcgaattgaagatactgataaaaaacgtaatttagaagatggagaaacatcacaatttgataatcttaaatggttaggattagattgggatgagtctgtagataaagacaatggctacggaccatatcgtcaatctgaacgtcaacatatctaccaaccattaatagatcagttactagcagaagataaagcatataaatgctatatgacagaagaagaattagaagctgaacgtgaagcgcaaatcgctcgtggtgaaatgcctcgctatggtggtcaacatgcgcatttgactgaagaacaacgtcaacaatttgaagcagaaggacgccaaccatcaattcgtttccgagtacctcaaaaccaaacgtattcatttgatgatatggtaaaaggaaatatttcatttgattcaaatggtattggtgactgggttatcgtaaaaaaagatggcattccaacgtacaattttgcagtagctatagatgatcattacatgcaaatttcagatgtaattcgtggtgatgatcatatttcaaacacgcctaaacaaattatgatttatgaagcatttggctgggagccacctcgttttggtcatatgtcattaattgttaatgaagaacgtaaaaagttaagtaaacgtgatgggcaaattttacaatttattgagcaatatcgtgacttaggttatttacctgaagcgttatttaattttattgcgttattaggttggtctcctgaaggtgaagaagaaatcttttctaaagaagaatttatcaaaatctttgatgaaaagcgtttgtcaaaatcaccagcatttttcgataagcaaaaattagcatgggttaataaccaatatatgaaacaaaaagatactgaaacagtattccaattagcattacctcatttaattaaagcaaatttgattcctgaggtgccgtcagaagaggatttatcttggggacgcaaattaattgcgctttatcaaaaagaaatgagttatgccggtgaaattgtacctttatcagaaatgttctttaaagaaatgccagctcttggtgaagaagaacaacaagtgattaatggagagcaagtaccagagttaatgacgcacttattcagtaaattagaagcacttgaaccatttgaagcggctgaaattaaaaagacaattaaagaagttcaaaaagaaacaggaataaaaggcaagcaattatttatgcctattcgtgttgctgtaacaggccaaatgcatggtcctgaattaccaaatacaattgaagtacttggtaaagaaaaagtgctaaaccgtttaaaacaatataagtaatgaaatagacaagatcaaggtagtatatacttgaattttataacgtaaccacatatgataaagttgtattaacaaattacaacaatatgaataaagtattttatataaaacgaaggattagtaattaaatttatacgatgcagagagtgtacggttgctgtgagtacaacgtagaaattaatgaatgcaccttcgtaaaatgaattaaatatataatgagagtgatgagcattaagttgacttagtttccttgataatttggaagcgcccgcaatattattaatgttattcgctaaattcagagtggaaccgtgcggaagcgcctctaacaatacaatttgtatgttagtggtgcttttttgatatttaatttcgcaggtacttcaattatgtatttacgtagttcaatcattgaggaggaaatgatcttgttaaaaagaatgagagacgatataaaaatggtatttgagcaggatccagcggcacgttcaacattagaagtcattacaacgtatgcaggtttacatgcagtttggagtcatttgattgcacataagttatacaaccaaaaaaaatatgttgcagcacgcgcgatatctcaaatttcaagatttttcacaggtatagaaatccatccaggtgctaaaattggaaagcgtctatttatagatcatggtatgggcgttgtaataggagaaacatgtacaattggtgataatgtgacaatctatcaaggcgtgacacttggtgggacagggaaagaaagagggaaaagacacccagatataggagacaatgttttaatagcagcgggtgcgaaagttttaggaaatattaaaataaattcaaatgtaaatattggtgcaaattcagttgttttacaatcagttccaagctattcaacggttgttggtataccaggacatattgttaagcaagatggtgttcgagttggaaaaacatttgatcatcgccatctacctgatccaatttatgaacaaattaagcatttagaacgacaacttgaaaagactaggaatggagagattcaagatgattacattatataatacgcttacacgtcaaaaagaagtgttcaagcctatagaaccaggaaaagtaaaaatgtatgtatgtggtcctactgtatataactacattcatattggtaacgcaagaccagcaattaattatgacgtagtgagacgttactttgaataccaaggatataatgtagaatatgtatcaaattttacagacgtagatgataaattaattaaacgttctcaagaattaaatcagtctgttcccgaaattgcagaaaaatatatcgcagcttttcatgaagatgttggtgcgttaaatgttagaaaagcgacttcaaatccaagggtaatggaccatatggatgacattattcaatttattaaagagttggtggatcaaggttatgcatatgaaagtggtggcgatgtttactttagaacacgtaaatttgaaggttatggtaaattaagtcatcaatccatagatgacttaaaagtgggtgctcgtatagatgcaggagagcataaagaagatgcacttgattttacattgtggaaaaaagcgaagcctggcgagattagttgggatagcccatttggtgaaggtagaccaggatggcatatagaatgttctgtaatggcatttcatgagctaggacctacaattgatatacatgcgggtggttcagatttacaatttccacatcatgaaaatgaaatagcacaatcagaagcacataatcatgcgccatttgctaattattggatgcataatggtttcattaatattgataatgaaaaaatgagtaaatcactaggcaactttattttagttcacgatattattaaagaagttgatccagatgtactaagattctttatgattagcgtacattatagaagcccaattaactataatctagaattggtagaatcagcacgtagtggactagagcgtattcgcaatagttatcaattaattgaagagcgcgcacaaattgctactaatattgaaaatcaacagacatatattgatcaaattgatgcgattttaaatcgttttgaaacagttatgaatgatgattttaatacagctaatgcaattacagcttggtatgatttagcaaaacttgcgaataaatatgtactagagaacacaacatcaacagaagtaattgataaatttaaagcagtttatcaaattttcagcgatgttttaggtgtaccgttaaaatctaaaaatgcagatgaattattggatgaagatgttgaaaaattaatcgaagagcgtaatgaagcaaggaaaaacaaagattttgcacgagcagatgaaattcgagacatgctgaaatcacaaaacattatattagaagacacacctcaaggggttagatttaaacgtggataatcaacaagataatcacattaaattattgaatccattgaccttagcatatatgggagacgcagtcttagatcaatatgtacgtacctatatcgttttaaagcttaaaagtaagcctaataaactacatcaaatgtctaaaaaatatgtatctgccaaaagtcaggcgcaaacgttagaatatttaatggagcaagaatggtttacagacgaagaaatggatattttgaagcgagggcgtaacgcgaaaagtcatactaaagctaaaaacactgatgttcaaacatatcgtaaaagttcagcgatagaagcagtgataggttttctttatttagaaaaaagagaagaacgattagaggcattattaaataaaataataacaatagtaaacgaaaggtagtgacgatgtggaagatacggttattgttggtaggcatgctgttagagaagcgattattactgggcatccgataaataagatattgattcaagaaggtattaaaaagcaacaaattaatgaaattttaaaaaatgcaaaagatcaaaaaatcattgttcaaactataccaaaatctaaattagattttttagcaaatgcaccacatcagggtgttgcagcgcttattgcaccatatgaatatgctgacttcgatcaatttttaaaacagcaaaaagaaaaagaaggtttatcgacagtacttatattagacggcttagaagacccacataacttgggatcaattttaagaacagccgatgcaacgggagttgatggtgttattattcctaaacgtcgttcagttacactaacgcaaacagttgcaaaagcctcaacaggtgcaattgaacatgtaccagttattcgagtgacaaatttagctaaaactatcgatgaactaaaagataatggcttttgggtagctggcactgaagctaataatgcaacagattatagaaatctagaagcggacatgtcattggctattgtaattggtagcgaaggacagggtatgagtcgcctagtaagtgataaatgcgatttttatattaagattccaatggttggacatgtaaacagtttgaatgcttcggttgcagcaagtttaatgatgtacgaagtatttcgaaaaagacatgatgttggagaaatataatgaaagaacgttacttaatcattgatggatacaatatgataggacaatcaccaacgctaagcgccattgcaaaagagaatttagaagaagctagaatgcaattaatagatgcaattgcaaattataatgcagttatttcagatgaaattatttgtgttttcgatgcttatgaccaatcgggtgttgaaagagaatacatgtatcatggcgttaaaacgatttttaccaaggaaaaagaaacagctgatagtttcatagaacgttatgtttatgaactttatgacaagcatactaagcatattacagttgtaacaagtgatatgagtgagcaacatgctatctttggatcaggtgcatatagaatatcatctcgcgaaatgtggagagatttaaaagaaaatgaaattgatgtgagtaaatcattagatgatataagtgaaaacaagccaagaactcgaattccgttatcttctgaaatccttgcagaatttgaaaaaatacgaagaggacatcataagaaatgacatttccgtcatcttgaaattttgaatgtaacaatattaaactaaccttaaattttagatagaaggggttagtttaatatttgaaatacgatttgacaactcaagacagtacaatcaaacgtaacaatgcaataaatgataaagacttcgaaaagttagtaatggatctacaaccattaattattcgacgcatcaaaacatttggatttaatcattatgatttagaagacttatatcaagaaatacttatacggatgtataggtcggtccaaacatttgattttagtggagagcagcctttcacaaattatgttcaatgtttaattacgtctgtaaagtatgattatttgagaaaatatttagctacaaataaaagaatggataatttgattaatgaatatagagttacgtatccatgtgcaataaagcgttttgatgttgaaaacaattatttgaataaattagcaattaaagagttgatttgtcagtttaagtatttgagtgcatttgaaaaagatgtcatgtatttaatgtgtgaacaatataagccgagagaaattgctcaattgatgcatgtaaaagagaaagtgatttataatgccatacaacgatgtaaaaataaaataaaacgttatttcaaaatgatttgaaaagcgccttaggacgtgaattgaattataacgtgttacttactgatggtttgacatttgttataaattttatgtatagtatactggtattataatgaataaaggtgaattattgtgagaaaaatacctttaaattgtgaagcttgtggcaatagaaattataatgttcctaagcaagaaggctcggcaacaagattaaccttaaagaaatattgtccaaaatgtaacgcgcacacaattcataaagaatcgaaataaatacattcgaaataatactttgataatatgttcaaaggatttggaggttgagcagatggctaaaaaagaaagtttctttaaaggcgttaagtctgaaatggaaaaaacaagttggccgacgaaagaagagctatttaaatatactgtaattgtagtttctactgttatattcttcttagtctttttctatgccttagatttaggaattacagcattgaaaaatttattatttggttagaggagtgaagacatgtctgaagaagttggcgcaaagcgttggtatgcagtgcatacatattctggatatgaaaataaagttaaaaagaatttagaaaaaagagtagaatctatgaatatgactgaacaaatctttagagtagtcataccggaagaagaagaaactcaagtaaaagatggcaaagctaaaacgactgttaaaaaaacattccctggatatgttttagtggaattaatcatgacagatgaatcatggtatgtggtaagaaatacaccaggcgttactggttttgtaggttctgcaggtgcagggtctaagccaaatccattgttaccagaagaagttcgcttcatcttaaaacaaatgggtcttaaagaaaagactatcgatgttgaactcgaagttggcgagcaagttcgtattaaatcaggtccatttgcgaatcaagttggtgaagttcaagaaattgaaacagataagtttaagctaacagtattagtagatatgtttggccgagaaacaccagtagaagttgaattcgatcaaatagaaaagctttaattaacaattaaagttattaaactaaccaaaagataaaaaagagtattgattttttaattagaaaagtgttaaaattatgtggtcgcgcttttagagcgcccatttcgtcacgaaatgttaagagtgggagggcaaaactgagccctgtgaccacatcacgatatcaaggaggtgcacatcgtggctaaaaaagtagataaagttgttaaattacaaattcctgcaggtaaagcgaatccagcaccaccagttggtccagcattaggtcaagcaggtgtgaacatcatgggattctgtaaagagttcaatgcacgtactcaagatcaagcaggtttaattattccggtagaaatcagtgtttatgaagatcgttcatttacatttattacaaaaactccaccggctccagtattacttaaaaaagcagctggtattgaaaaaggttcaggcgaaccaaacaaaactaaagttgctacagtaactaaagatcaagtacgcgaaattgctaacagaaaaatgcaagacttaaacgctgctgacgaagaagcagctatgcgtattatcgaaggtactgcacgtagtatgggtatcgttgtagaataattttacgaatattaaatttgattacatgatttaaacgatgaagcagataacagagataataatgatgaattataaatataatctgaatgactagattaatgattgatttattcataagattaattcttctgttgtctgctcttaacttgcatatagcaagtaatgtgggaggaaattccgctaaaaccactaaaggaggaactataaatggctaaaaaaggtaaaaagtatcaagaagcagctagtaaagttgaccgtactcagcactacagtgttgaagaagcaattaaattagctaaagaaacaagcattgctaactttgacgcttctgttgaagttgcattccgtttaggaattgatacacgtaaaaatgaccaacaaatccgtggtgcagttgtattaccaaacggaactggtaaatcacaaagtgtattagtattcgctaaaggtgacaaaattgctgaagctgaagcagcaggtgctgactatgtaggtgaagcagaatacgttcaaaaaatccaacaaggttggttcgacttcgatgtagtagttgctacaccagacatgatgggtgaagttggtaaattaggtcgtgtattaggaccaaaaggtttaatgccaaaccctaaaactggaactgtaacaatggatgttaaaaaagctgttgaagaaatcaaagctggtaaagtagaatatcgtgctgaaaaagctggtatcgtacatgcatcaattggtaaagtttcatttactgatgaacaattaattgaaaacttcaatactttacaagatgtattagctaaagctaaaccatcatctgctaaaggtacatacttcaaatctgttgctgtaactacaacaatgggtcctggagttaaaattgatactgcaagtttcaaataataaatgatataaacaattacaggctgaaagaaatatctttcagtctgtaaaaatatattgacaataagtaatttccaagttatattacttattgtgattattttacctaagacagtaggagttatttataacttaaaatttatcctgccgaggctaaaattgacttgaacgtgatgatctatgatctttcaagcactttttgccgtgggtagaaagtgctttttttattaattttaaaaaaagcaccaaaaatttaaatggaggtgtctgaatgtctgctatcattgaagctaaaaaacaactagttgatgaaattgctgaggtactatcaaattcagtttcaacagtaatcgttgactatcgtggattaacagtagctgaagttactgacttacgttcacaattacgtgaagctggtgttgagtataaagtatacaaaaacactatggtacgtcgtgcagctgaaaaagctggtatcgaaggcttagatgaattcttaacaggtcctactgctattgcaacttcaagtgaagatgctgtagctgcagcgaaagtaatttctggatttgctaaagatcatgaagcattagaaattaaatcaggcgttatggaaggcaatgttattacagcagaagaagttaaaactgttggttcattaccttcacacgatggtcttgtatctatgcttttatcagtattacaagctcctgtacgcaacttcgcttatgcggttaaagctattggagaacaaaaagaagaaaacgctgaataatttttagcgtaaaaaaattaaaaataatggaggaattataaaatggctaatcatgaacaaatcattgaagcgattaaagaaatgtcagtattagaattaaacgacttagtaaaagcaattgaagaagaatttggtgtaactgcagctgctccagtagcagtagcaggtgcagctggtggcgctgacgctgcagcagaaaaaactgaatttgacgttgagttaacttcagctggttcatctaaaatcaaagttgttaaagctgttaaagaagcaactggtttaggattaaaagatgctaaagaattagtagacggagctcctaaagtaatcaaagaagctttacctaaagaagaagctgaaaaacttaaagaacaattagaagaagttggagctactgtagaattaaaataattcaagtatcttaaacttaataatcaaagttttatagcaagtattgctataatataatgattctttgagaagttaaaaccccgttattttgataacggggttttattcatttaaagactgagtgaaatgttataattataatgacgagttacaaagtgaagatgaggtggaataatgagtcattattacgatgaagatccaagtgtaattagcaatgaacaacgtattcaatatcaattaaaccatcataaaattgatttaataactgataacggagtgttttcgaaagataaagtagattatggttcagatgttcttgttcaaacttttttaaaagcgcatccacctggtccaagtaagcgaattgccgatgttggttgtggttacggaccaattggtttgatgattgctaaagtatcaccacatcattcaattacaatgctagatgttaatcacagagcgctagccttagttgaaaaaaacaaaaaattaaatggtattgataatgtgatcgtaaaggaaagtgatgctttgtctgctgtggaagacaaaagttttgattttattttaaccaatccaccaataagagcagggaaagaaaccgtgcatcgtatattcgagcaagcattacatagattagactcgaacggtgaactattcgttgtaattcagaagaagcaaggtatgccatctgcaaagaaaagaatgaatgaactttttggaaatgtagaagtggtaaataaagataaaggatattacattctgagaagtataaaagcttgaaatgaaatggatattctgttatagttatataatgtaaaaatttatgttcaataagtgtgtacttttacgttaaatagataagttaattaagaataaatatagaatcgaaaatggtgtcatcattagtgttgccgttttctttttgtctttttattaatatgcttatggtatttagctaaaagcggatcacataatttttgaggggtgaatctgtttggcaggtcaagttgtccaatatggaagacatcgtaaacgtagaaactacgcgagaatttcagaagtattagaattaccaaacttaatagaaattcaaactaaatcttacgagtggttcctaagagaaggtttaatcgaaatgtttagagacatttctccaattgaagattttactggtaatttgtcattagagtttgtggattaccgtttaggagaaccaaaatatgatttagaagaatctaaaaaccgtgacgctacttatgctgcacctcttcgtgtaaaagtgcgtctaatcattaaagaaacaggagaagttaaagaacaagaagtctttatgggtgatttcccattaatgactgatacaggtacgttcgttatcaatggtgcagaacgtgtaatcgtatctcaattagttcgttcaccatccgtttatttcaatgaaaaaatcgacaaaaatggtcgtgaaaactatgatgcaacaattattccaaaccgtggtgcatggttagaatatgaaacagatgctaaagatgttgtatacgtacgtattgatagaacacgtaaactaccattaacagtattgttacgtgcattaggtttctcaagcgaccaagaaattgttgaccttttaggtgacaatgaatatttacgtaatactttagagaaagacggcactgaaaacactgaacaagcgttattagaaatctatgaacgtttacgtccaggtgaaccaccaactgttgaaaatgctaaaagtctattgtattcacgtttctttgatccaaaacgctatgacttagcaagcgtgggtcgttataaaacaaacaaaaaattacatttaaaacatcgtttatttaatcaaaaattagctgagccaattgtaaatactgaaactggtgaaattgtagttgaagaaggtacagtgcttgatcgtcgtaaaatcgacgaaatcatggatgtacttgaatcaaatgcaaacagcgaagtgtttgaattgcatggtagcgttatagacgagccagtagaaattcaatcaattaaagtatatgttcctaacgatgatgaaggtcgtacgacaactgtaattggtaatgctttccctgactcagaagttaaatgcattacaccagcagatatcattgcttcaatgagttacttctttaacttattaagcggtattggatatacagatgatattgaccatttaggtaaccgtcgtttacgttctgtaggtgaattactacaaaaccaattccgtatcggtttatcaagaatggaaagagttgtacgtgaaagaatgtcaattcaagatactgagtctatcacacctcaacaattaattaatattcgacctgttattgcatctattaaagaattctttggtagctctcaattatcacaattcatggaccaagcaaacccattagctgagttaacgcataaacgtcgtctatcagcattaggacctggtggtttaacacgtgaacgtgctcaaatggaagtacgtgacgttcactactctcactatggccgtatgtgtccgattgaaacacctgagggaccaaacattggattgattaactcattatcaagttatgcacgtgtaaatgaattcggctttattgaaacaccatatcgtaaagttgatttagatacacatgctatcactgatcaaattgactatttaacagctgacgaagaagatagctatgttgtagcacaagcaaactctaaattagatgaaaatggtcgtttcatggatgatgaagttgtatgtcgtttccgtggtaacaatacagttatggctaaagaaaaaatggattatatggatgtatcgccgaagcaagttgtttcagcagcgacagcatgtattccattcttagaaaatgatgactcaaaccgtgcattgatgggtgcgaacatgcaacgtcaagcagtgcctttgatgaatccagaagcaccatttgttggtacaggtatggaacacgttgcagcacgtgattctggtgcggctattacagctaagcacagaggtcgtgttgaacatgttgaatctaatgaaattcttgttcgtcgtctagttgaagagaacggcgttgagcatgaaggtgaattagatcgctatccattagctaaatttaaacgttcaaactcaggtacatgttacaaccaacgtccaatcgttgcagttggagatgttgttgagtataacgagattttagcagatggaccatctatggaattaggagaaatggcattaggtagaaacgtagtagttggtttcatgacttgggacggttacaactatgaggatgccgttatcatgagtgaaagacttgtgaaagatgacgtgtatacttctattcatattgaagagtatgaatcagaagcacgtgatactaagttaggacctgaagaaatcacaagagatattcctaatgtttctgaaagtgcacttaagaacttagacgatcgtggtatcgtttatattggtgcagaagtaaaagatggagatattttagttggtaaagtaacgcctaaaggtgtaactgagttaactgccgaagaaagattgttacatgcaatctttggtgaaaaagcacgtgaagttagagatacttcattacgtgtacctcacggcgctggcggtatcgttcttgatgtaaaagtattcaatcgtgaagaaggcgacgatacattatcacctggtgtaaaccaattagtacgtgtatatatcgttcaaaaacgtaaaattcatgttggtgataagatgtgtggtcgacatggtaacaaaggtgtcatttctaagattgttcctgaagaagatatgccttacttaccagatggacgtccgatcgatatcatgttaaatcctcttggtgtaccatctcgtatgaacatcggacaagtattagagctacacttaggtatggctgctaaaaatcttggtattcacgttgcatcaccagtatttgacggtgcaaacgatgacgatgtatggtcaacaattgaagaagctggtatggctcgtgatggtaaaactgtactttatgatggacgtacaggtgaaccattcgataaccgtatttcagtaggtgtaatgtacatgttgaaacttgcgcacatggttgatgataaattacatgcgcgttcaacaggaccatattcacttgttacacaacaaccacttggcggtaaagcgcaattcggtggacaacgttttggtgagatggaggtatgggcacttgaagcatatggtgctgcatacacattacaagaaatcttaacttacaaatccgatgatacagtaggacgtgtgaaaacatacgaggctattgttaaaggtgaaaacatctctagaccaagtgttccagaatcattccgagtattgatgaaagaattacaaagtttaggtttagatgtaaaagttatggatgagcaagataatgaaatcgaaatgacagacgttgatgacgatgatgttgtagaacgcaaagtagatttacaacaaaatgatgctcctgaaacacaaaaagaagttactgattaatacgcaatttacaaaacaggcaaaaagatactaagctgaattttattgatgattcagtttagtactttaagccattttaaataaatgcaaatcaatcaaatagcacagctaatctaaattgaaggaggtaggctccttgattgatgtaaataatttccattatatgaaaataggattggcttcacctgaaaaaatccgttcttggtcttttggtgaagttaaaaaacctgaaacaatcaactaccgtacattaaaacctgaaaaagatggtctattctgtgaaagaattttcggacctacaaaagactgggaatgtagttgtggtaaatacaaacgtgttcgctacaaaggcatggtctgtgacagatgtggagttgaagtaactaaatctaaagtacgtcgtgaaagaatgggtcacattgaacttgctgctccagtttctcacatttggtatttcaaaggtataccaagtcgtatgggattattacttgacatgtcaccaagagcattagaagaagttatttactttgcttcttatgttgttgtagatccaggtccaactggtttagaaaagaaaactttattatctgaagctgaattcagagattattatgataaatacccaggtcaattcgttgcaaaaatgggtgcagaaggtattaaagatttacttgaagagattgatcttgacgaagaacttaaattgttacgcgatgagttggaatcagctactggtcaaagacttactcgtgcaattaaacgtttagaagttgttgaatcattccgtaattcaggtaacaaaccttcatggatgattttagatgtacttccaatcatcccaccagaaattcgtccaatggttcaattagatggtggacgatttgcaacaagtgacttaaacgacttataccgtcgtgtaattaatcgaaataatcgtttgaaacgtttattagatttaggtgcacctggtatcatcgttcaaaacgaaaaacgtatgttacaagaagccgttgacgctttaattgataatggtcgtcgtggtcgtccagttactggcccaggtaaccgtccattaaaatctttatctcatatgttaaaaggtaaacaaggtcgtttccgtcaaaacttacttggtaaacgtgttgactattcaggacgttcagttattgcagtaggtccaagcttgaaaatgtaccaatgtggtttaccaaaagaaatggcacttgaactatttaaaccattcgtaatgaaagaattagttcaacgtgaaattgcaactaacattaaaaatgcgaagagtaaaatcgaacgtatggatgatgaagtttgggacgtattggaagaagtaattagagaacatcctgtattacttaaccgtgcaccaacacttcatagacttggtattcaagcatttgaaccaactttagttgaaggtcgtgcgattcgtctacatccacttgtaacaacagcttataacgctgactttgacggtgaccaaatggcggttcacgttcctttatcaaaagaggcacaagctgaagcaagaatgttgatgttagcagcacaaaacatcttgaaccctaaagatggtaaacctgtagttacaccatcacaagatatggtacttggtaactattaccttactttagaaagaaaagatgcagtaaatacaggcgcaatctttaataatacaaatgaagtattaaaagcatatgcaaatggctttgtacatttacacactagaattggtgtacatgcaagttcgttcaataatccaacatttactgaagaacaaaacaaaaagattcttgctacgtcagtaggtaaaattatattcaatgaaatcattccagattcatttgcttatattaatgaacctacgcaagaaaacttagaaagaaagacaccaaacagatatttcatcgatcctacaactttaggtgaaggtggattaaaagaatactttgaaaatgaagaattaattgaacctttcaacaaaaaattcttaggtaatattattgcagaagtattcaacagatttagcatcactgatacatcaatgatgttagaccgtatgaaagacttaggattcaaattctcatctaaagctggtattacagtaggtgttgctgatatcgtagtattacctgataagcaacaaatacttgatgagcatgaaaaattagtcgacagaattacaaaacaattcaaccgtggtttaatcactgaagaagaaagatataatgcagttgttgaaatttggacagatgcaaaagatcaaattcaaggtgaattgatgcaatcacttgataaaactaacccaatcttcatgatgagtgattcaggtgcccgtggtaacgcatctaactttacacagttagcaggtatgcgtggattgatggccgcaccatctggtaagattatcgaattaccaatcacatcttcattccgtgaaggtttaacagtacttgaatacttcatctcaactcacggtgcacgtaaaggtcttgccgatacagcacttaaaacagctgactcaggatatcttactcgtcgtcttgttgacgtggcacaagatgttattgttcgtgaagaagactgtggtactgatagaggtttattagtttctgatattaaagaaggtacagaaatgattgaaccatttatcgaacgtattgaaggtcgttattctaaagaaacaattcgtcatcctgaaactgatgaaataatcattcgtcctgatgaattaattacacctgaaattgctaagaaaattacagatgctggtattgaacaaatgtatattcgctcagcatttacttgtaacgcacgacatggtgtttgtgaaaaatgttacggtaaaaaccttgctactggtgaaaaagttgaagttggtgaagcagttggtacaattgcagcccaatctatcggtgaaccaggtacacagcttacaatgcgtacattccatacaggtggggtagcaggtagcgatatcacacaaggtcttcctcgtattcaagagattttcgaagcacgtaaccctaaaggtcaagcggtaattacggaaatcgaaggtgtcgtagaagatattaaattagcaaaagatagacaacaagaaattgttgttaaaggtgctaatgaaacaagatcataccttgcttcaggtacttcaagaattattgtagaaatcggtcaaccagttcaacgtggtgaagtattaactgaaggttctattgaacctaagaattacttatctgttgctggattaaacgcgactgaaagctacttattaaaagaagtacaaaaagtttaccgtatgcaaggtgtagaaatcgacgataaacacgttgaggttatggttcgacaaatgttacgtaaagttagaattatcgaagcaggtgatacgaagttattaccaggttcattagttgatattcataactttacagatgcaaatagagaagcatttaaacaccgtaagcgtcctgcaacagctaaaccagtattacttggtattactaaagcatcacttgaaacagaaagtttcttatctgcagcatcattccaagaaacaacaagagttcttacagatgcagcaattaaaggtaagcgtgatgacttattaggtcttaaagaaaacgtaattattggtaagttaattccagctggtactggtatgagacgttatagcgacgtaaaatacgaaaaaacagctaaaccagttgcagaagttgaatctcaaactgaagtaacggaataacaagtatataacagaggctaatgctttagcctcttgttatttttatgtaaattatttgatttaatgttgacgaattctcttgttcaatgttaatatattaaaggttgatgcaagcagaactttggaggataaattattgtctaaggaaaaagttgcacgctttaacaaacaacattttgtagttggtcttaaagaaacgcttaaagcgttaaagaaagatcaagttacatctttgattattgctgaagacgttgaagtatatttaatgactcgcgtgttaagccaaatcaatcagaaaaatatacctgtatcttttttcaaaagcaaacatgctttgggtaaacatgtaggtattaacgtcaatgcgacaatagtagcattgattaaatgagaattagtaagtgttttacttactaaattttatttaacctaaaaatgaaccacctggatgtgtgggattaaaaagtgaagagaggaggacatatcacatgccaactattaaccaattagtacgtaaaccaagacaaagcaaaatcaaaaaatcagattctccagctttaaataaaggtttcaacagtaaaaagaaaaaatttactgacttaaactcaccacaaaaacgtggtgtatgtactcgtgtaggtacaatgacacctaaaaaacctaactcagcgttacgtaaatatgcacgtgtgcgtttatcaaacaacatcgaaattaacgcatacatccctggtatcggacataacttacaagaacacagtgttgtacttgtacgtggtggacgtgtaaaagacttaccaggtgtgcgttaccatattgtacgtggagcacttgatacttcaggtgttgacggacgtagacaaggtcgttcattatacggaactaagaaacctaaaaactaagaatttagtttttaattaaatcttaaacttaaaatatttaatataaggaagggaggatttacattatgcctcgtaaaggatcagtacctaaaagagacgtattaccagatccaattcataactctaagttagtaactaaattaattaacaaaattatgttagatggtaaacgtggaacagcacaaagaattctttattcagcattcgacctagttgaacaacgcagtggtcgtgatgcattagaagtattcgaagaagcaatcaacaacattatgccagtattagaagttaaagctcgtcgtgtaggtggttctaactatcaagtaccagtagaagttcgtccagagcgtcgtactactttaggtttacgttggttagttaactatgcacgtcttcgtggtgaaaaaacgatggaagatcgtttagctaacgaaattttagatgcagcaaataatacaggtggtgccgttaagaaacgtgaggacactcacaaaatggctgaagcaaacaaagcatttgctcactaccgttggtaagataaaagcttttaccctgagtgtgttctatattaatgaattttcattaagcgttcatgcttagggcatcgccatatctatcgtatttattcagtaatataaactggaaggagaaaaaatacatggctagagaattttcattagaaaaaactcgtaatatcggtatcatggctcacattgatgctggtaaaacgactacgactgaacgtattctttattacactggccgtatccacaaaattggtgaaacacacgaaggtgcttcacaaatggactggatggagcaagaacaagaccgtggtattactatcacatctgctgcaacaacagcagcttgggaaggtcaccgtgtaaacattatcgatacacctggacacgtagacttcactgtagaagttgaacgttcattacgtgtacttgacggagcagttacagtacttgatgcacaatcaggtgttgaacctcaaactgaaacagtttggcgtcaggctacaacttatggtgttccacgtatcgtatttgtaaacaaaatggacaaattaggtgctaacttcgaatactctgtaagtacattacatgatcgtttacaagctaacgctgctccaatccaattaccaattggtgcggaagacgaattcgaagcaatcattgacttagttgaaatgaaatgtttcaaatatacaaatgatttaggtactgaaattgaagaaattgaaattcctgaagaccacttagatagagctgaagaagctcgtgctagcttaatcgaagcagttgcagaaactagcgacgaattaatggaaaaatatcttggtgacgaagaaatttcagtttctgaattaaaagaagctatccgccaagctactactaacgtagaattctacccagtactttgtggtacagctttcaaaaacaaaggtgttcaattaatgcttgacgctgtaattgattacttaccttcaccactagacgttaaaccaattattggtcaccgtgctagcaaccctgaagaagaagtaatcgcgaaagcagacgattcagctgaattcgctgcattagcgttcaaagttatgactgacccttatgttggtaaattgacattcttccgtgtgtattcaggtacaatgacatctggttcatacgttaagaactctactaaaggtaaacgtgaacgtgtaggtcgtttattacaaatgcacgctaactcacgtcaagaaatcgatactgtatactctggagatatcgcggctgcggtaggtcttaaagatacaggtactggtgatactttatgtggtgagaaaaatgacattatcttggaatcaatggaattcccagagccagttattcacttatcagtagagccaaaatctaaagctgaccaagataaaatgactcaagctttagttaaattacaagaagaagacccaacattccatgcacacactgacgaagaaactggacaagttatcatcggtggtatgggtgagcttcacttagacatcttagtagaccgtatgaagaaagaattcaacgttgaatgtaacgtaggtgctccaatggtttcatatcgtgaaacattcaaatcatctgcacaagttcaaggtaaattctctcgtcaatctggtggtcgtggtcaatacggtgatgttcacattgaattcacaccaaacgaaacaggcgcaggtttcgaattcgaaaacgctatcgttggtggtgtagttcctcgtgaatacattccatcagtagaagctggtcttaaagatgctatggaaaatggtgtcttagcaggttatcctttaattgatgttaaagctaaattatatgatggttcataccatgatgtcgattcatctgaaatggccttcaaaattgctgcatcattagcacttaaagaagctgctaaaaaatgtgatcctgtaatcttagaaccaatgatgaaagtaactattgaaatgcctgaagagtacatgggtgatatcatgggtgacgtaacatctcgtcgtggacgtgttgatggtatggaacctcgtggtaatgcacaagttgttaatgcttatgtaccactttcagaaatgttcggttatgcaacatcattacgttcaaacactcaaggtcgcggtacttacactatgtacttcgatcactatgctgaagttccaaaatcaatcgctgaagatattatcaagaaaaataaaggtgaataatataacttgttttgactagctagcctaggttaaaatacaaggtgagcttaaatgtaagctatcatctttatagtttgattttttggggtgaatgcattataaaagaattgtaaaattctttttgcatcgctataaataatttctcatgatggtgagaaactatcatgagagataaatttaaatattatttttaattagaataggagagattttataatggcaaaagaaaaattcgatcgttctaaagaacatgccaatatcggtactatcggtcacgttgaccatggtaaaacaacattaacagcagcaatcgctactgtattagcaaaaaatggtgactcagttgcacaatcatatgacatgattgacaacgctccagaagaaaaagaacgtggtatcacaatcaatacttctcacattgagtaccaaactgacaaacgtcactacgctcacgttgactgcccaggacacgctgactacgttaaaaacatgatcactggtgctgctcaaatggacggcggtatcttagtagtatctgctgctgacggtccaatgccacaaactcgtgaacacattcttttatcacgtaacgttggtgtaccagcattagtagtattcttaaacaaagttgacatggttgacgatgaagaattattagaattagtagaaatggaagttcgtgacttattaagcgaatatgacttcccaggtgacgatgtacctgtaatcgctggttcagcattaaaagctttagaaggcgatgctcaatacgaagaaaaaatcttagaattaatggaagctgtagatacttacattccaactccagaacgtgattctgacaaaccattcatgatgccagttgaggacgtattctcaatcactggtcgtggtactgttgctacaggccgtgttgaacgtggtcaaatcaaagttggtgaagaagttgaaatcatcggtttacatgacacatctaaaacaactgttacaggtgttgaaatgttccgtaaattattagactacgctgaagctggtgacaacattggtgcattattacgtggtgttgctcgtgaagacgtacaacgtggtcaagtattagctgctcctggttcaattacaccacatactgaatttaaagcagaagtatacgtattatcaaaagacgaaggtggacgtcacactccattcttctcaaactatcgtccacaattctatttccgtactactgacgtaactggtgttgttcacttaccagaaggaactgaaatggtaatgcctggtgataacgttgaaatgacagtagaattaatcgctccaatcgcgattgaagacggtactcgtttctcaatccgcgaaggtggacgtactgtaggatcaggcgttgttactgaaatcattaaataatttctaatttcttagattttatataaaaagaagatccctcaatcgaggggtctttttttaatgtgtaaattttgtaatggctattcgatttagaagaacaataattgatgaaagactgactaataaaacttataactgataatactgtttaaataaaattgttgagtcttggacattgtaaaatgctcccttcaaagttttcattttttcaatgtctactttgaagggagcatttcattagtttatgtcccagattcatatctttcaattaatttaaatgcttaatttgttttaaatacttgctctaattcaatgatttttaaaaatacagctacagcgtattttaatgatttttcatcaatatcaaatttgggattatggtgtggcgctgtaatacctttactttcattaccacaaccagtcagaaagaatgcacctggtcgtactttcaaataatgtgaaaaatcttctccaatcatcattaaatctgattcattaaagcgtacatgtaagtcatttgttgcttctttaataacttgatatgctttctcgttattatggacaggcaaataccctttaatataattcaaatcatagttaatatcatttgctattgctaaaccttgtagaagcttatccattttgtccattacatgattctgtatatctgaatcgaaagttctaactgtacctttacaaaatgcttgatcaggaataacgctatctgtggtacctgcttgaatcattccaaatgaaagtacagcttgtttaactggatcgatcgtacgtgaaattattttttgtgcacttaaaatgaactctgccatgattactattgggtcaatggtttcatgaggtttggcaccatgaccaccacgacctttaattgtgacgctaaattcatctggagaggccatgattgcccccgcacgtgaatgaatagttccagtaggataaccactccataaatgtgtaccgtaaattctatctacattttccagacatccagcatctatcatttcttgagaaccacctggcatgatttcttcaccgtactggaatattaatacaacattaccttctaataaatgtttatgttcatctaaaatctctgctacagtaagtaaaattgctgtatgaccatcatgcccacacgcatgcatacatcctggatttttagacttataaggcacatcgtttaattcctcgacaggtaacgcatcaaagtcagctcttaatgcaatggtaggtcctgtgcccaagcctttaaatgtggctttgataccattgcggccgataggagtttcaatatcacaagataactggcttaattggttaacaatataatcatgtgtttgaaattcttcaaaagataactcaggatattggtgtaaataacgtctgagttgaattgttttattttctttattatttgctagttggaaccaatctaacacccttatcactactttctaaaataatgtttatagtataacattttatgaaattatcgtactaaatgattgctttgagatattttatctatgaatgataaggctttcaagttatgtagaattactgtatgataaaggtattaccaaacaatacttaagggggattatatactgtggttcaatcattacatgagtttttagaggaaaatataaattatctaaaagaaaatggtttgtataatgaaatagatacaattgaaggtgcaaacggaccagaaatcaaaatcaatgggaaatcatacattaacttatcttcaaataattatttaggactagcaacaaatgaagatttgaaatcagctgcaaaagcagctattgatacacatggtgtaggtgcaggcgctgttcgtacaatcaatggtacattagatttacacgacgaattagaagaaacactagcaaaatttaaaggaacagaagctgcaatagcttatcagtcaggatttaattgtaatatggctgctatttcagctgtcatgaataaaaatgatgctattttatcagatgagcttaatcatgcatcaattattgatggatgtcgcttatctaaagctaaaattattcgagttaaccattcagacatggatgatttacgtgcgaaagcaaaagaagcagttgaatcaggtcaatacaataaagtgatgtatatcactgatggcgtttttagtatggatggtgatgtggctaaattacctgaaattgtagaaattgcagaagaatttggtttattaacttatgttgacgacgctcatggttcaggtgttatgggtaaaggcgctggtacggttaaacattttggtttacaagataaaatcgatttccaaataggtacgctttctaaagcaattggtgtcgttggcggctatgtagcaggtacaaaagagttaatagattggttaaaagcacaatcacgaccattcttattctctacatcattagcacctggggataccaaagcaataactgaagcagttaaaaagttaatggattcaactgaattacatgataaattatgggacaatgcacaatatttaaaaaatggattgtcaaaattaggatatgatacaggtgagtcagaaactccaattacaccagtaattattggtgatgaaaaaacaactcaagaatttagtaagcgtttaaaagacgaaggtgtctatgtgaaatctatcgttttcccaacagtaccaagaggtacaggacgtgtaagaaatatgcctacagctgcacatacaaaagacatgttagatgaagcaattgcggcttatgaaaaagtaggaaaagaaatgaagttgatttaatatttatttatttattcccacggcaaatattgtcgtgggctttttttaatgtttagtttattaacagtaagttcttataacaatgtttagtgctccccaaaattgaagtttgaattttaaaagcatcttgtagaatttagttgtattttttacaaagaaattcattttgattatttttgataatgagcattttaatagtaatacatgtttatagtgtgtagtatatgtctatactagtagtaactatatagagaaagtaggaataaactatgtcacaagatgtaaatgaattaagtaagcaaccaacgccagataaagcagaagataacgcatttttcccatcaccatattcccttagtcaatatacagcacctaaaacagattttgatggtgttgaacacaaaggtgcctataaagatggtaaatggaaagtattgatgattgctgctgaagagagatatgtattattggaaaatggaaaaatgttctctacgggtaatcatcctgttgaaatgttattacctttacatcatttaatggaagcaggttttgacgttgatgttgcgacattatctggttatccagttaaattagaattatgggctatgccaactgaagacgaggcagttataagtacttataataaattgaaagaaaaattaaaacagccaaaaaaattagcagatgtgattaaaaatgaattaggacctgattcagactatttatctgtctttatcccaggcggacatgctgcagttgttggtatttctgaaagtgaggacgttcaacaaacattagattgggcattagacaatgaccgttttatagttacattatgtcatggaccagcagcactactttcagcagggcttaacagagaaaaatctccattagaaggatactctgtttgtgtcttccctgactcattagatgaaggtgcaaatattgaaataggttatttacctgggcgcttgaaatggttagttgctgatttactaactaaacaaggattaaaagtagttaacgacgatatgacaggaagaacgttaaaagatcgtaaattattaacaggtgacagtcctttagcttcaaatgagttaggaaaattagcagttaatgaaatgttaaatgcaatacaaaataaataattaaatattaattagaggagcctcatatgtaaatgtatgaggactcttttttttggcaaaatttaagtgatacttgtaaaatagaacctattatgagtatgatttaagaaaacgcttgcaaaactaataaccgcaactagcgatatggaggaaacatgatgtcttatagcattggaattgattatggaacagcttcaggccgtgtgtttttaattaatacaactaacggtcaagtagtatcaaaatttgtgaaaccatatacacatggtgtcattgagagtgaattaaatggtttgaaaataccacatacatatgcacttcaaaatagtaatgattatttagaaattatggaagaaggaatatcatatatagtacgtgaatcaaaaatagatccagtcaatatagtaggtattggtatagactttacttcatctactattatttttactgacgaaaaccttaacccggtacataatttaaaacaatttaaaaacaatccacatgcgtatgtgaaactttggaaacatcatggtgcatataaagaagcagagaaattatatcaaactgctattgaaaataataataagtggttaggccattatggatataatgttagtagtgaatggatgattcccaaaataatggaagtcatgaatcgagcaccagaaattatggaaaaaacggcttatattatggaagcgggcgattggattgtaaataaattaactaataaaaatgtacgctcgaattgtggattaggtttcaaagcattttgggaagaagaaacagggtttcattatgatttatttgataaaatagaccccaaattatcaaaagtaattcaagataaagtatctgcaccggttgttaatattggtgaagtagtagggaaactggacgataaaatggcacagaaattaggattatcaaaagagactatggtaagtccttttattattgatgcccatgctagtttattaggtattgggtctgaaaaagataaagaaatgactatggtgatgggaacaagcacatgccatcttatgttaaatgaaaagcaacatcaagtgccaggtatatcaggttctgtaaaaggagcaattattccagaattatttgcttatgaagcggggcaatcagcagtaggtgatttgtttgagtatgtcgctaagcaagcaccaaagtcatatgtagatgaagcagcaaatagaaatatgactgtatttgaattaatgaatgaaaagataaaacatcaaatgccaggtgaaagtgggctcattgctcttgattggcataatggaaatcgaagtgtattaagtgatagcaatttaacaggttgtatctttggattaactttacaaactaagcatgaggatatttatagagcatatttagaagctacagcatttggtactaagatgattatgcaacagtatcaagattggcatatggaagtagaaaaggtatttgcatgtggcggtatacctaaaaagaatgctgttatgatggatatctatgcgaatgtactgaataaaaaactaattgttatggatagtgagtatgcaccagcaataggcgcagcaatattaggtgcagtcagtggtggcgcacataattcaattaatgatgcagttgatgctatgaaagagccaattttatacgaaattaatccagaagcggaaaaagtacaaaggtatgaaacattatttaaagcttataaggctttacatgatatccatggttataaaaaagctaatataatgaaagatatccagagtttaagagttgagggataaaaaatttaatttgacagtaattagtaatattcaacgctataaattactaaaatcaattaatacaactagaatttccatttacggaaataacagcaacatgtacatgtcatatatacaagaaagcgcttttatattataattattatgaaaacgaatattatgtccgcttgtgatggactatagctatatagaagagacaaaggagatatttctatgaaaaaaattatgattactggtgcattaggacaaattggtacagaattagttgttaagtgcagagaaatttatgggacagataatgttcttgctacagatattagggaacctgaagcagactcacctgtacaaaatggaccatttgaaatcttagacgtaacagatcgtgaccgtatgtttgagttagttagggactttgaagcggatagtctaatgcatatggcagcattattatcagcaactgcagagaaaaatccaattctagcttgggatttaaatatgggtggattaatgaatgcattagaagctgcaagaacttataatttgcactttttcacaccaagttcaattggtgcatttggagactcaactcctaaagttaatacgccacaagtaacaattcagcaacctacgacaatgtatggtgtaaataaagtagctggagaattattgtgtcaatactatttcaaacgttttggtgtagatacaagaagtgttagattcccaggtttaatctcgcatgttaaagagccaggtggcggtactacagactatgctgttgaaatatacttcaaagcagtaagagaaggtcattatacaagcttcatagataaaggcacgtatatggatatgatgtatatggatgatgcaattgaagcaattattaaacttatggaagcagacgacgctaaattagaaactagaaacggttataatttgagcgcaatgagttttgatccagagatggtaaaagaagcaattcaagaatactatcccaattttacattagattacgatgttgatcctattagacaaggtatcgctaatagttggccggattctattgatacaagctgttcacgtggcgaatggggatttgatcctaaatatgatttagcgagcatgactaaattaatgttagaagctattgaacaaaaagatactgttaaaaataataactaatcatttccattcactttaatacacggaatgatattttaaattactctttattttaataaactagtgcatgaattctgatattattcattatacatattgaattcgcgagcttagttcattttaaagtaaagagttttttgtatgtaaagtatattagtaaaacacagattacttgtctctgtgaaattaatacgtttatactaaaagatatagtctttctagaaaatctgttaattaattttgaatttttagaaaatttattgaacagcaaaatatggattgttataatttaagttaaacaaattcttatacaatattattaggaggcaatcaccatgtcacaagcagttaaagttgaacgacgagaaacattaaaacaaaaaccaaatacatctcaactaggttttggtaaatattttactgattatatgttgagttatgattatgatgcagataaaggatggcatgatttgaagatagtaccttatggtcctattgaaatttcacctgctgcacaaggtgttcattatggtcaatcggtattcgaaggattaaaagcatataaaagagatggggaagttgcacttttccgtcctgaagaaaattttaagcgtcttaataactcgttagcacgattagaaatgcctcaagtagacgaagcagaattgttagaggggctaaaacaattagttgatattgaaagagattggattcctgaaggggaaggtcaatcattatatattcgtccatttgtttttgcaacagaaggggcacttggcgttggtgcatcacatcagtataaattattaattattttatctccttcaggtgcatattatggtggtgaaactttaaaaccaactaaaatctatgtagaagatgaatatgtgcgtgctgttcgtggcggtgtaggctttgcaaaagttgcaggtaactatgcggcaagtttattagcacaaactaatgcaaataaattaggttatgaccaagtattatggcttgatggtgttgaacagaagtatatcgaagaagttggtagcatgaacattttcttcgttgaaaatggcaaagtaattacaccagagttgaatggcagtattttacctggtattacacgtaaatctattatcgaattagctaaaaacttaggatatgaagtcgaagagcgccgcgtttcaatcgatgaattattcgaatcatatgataaaggtgagttaacagaagtatttggtagtggtactgcagcagttatttcacctgtgggtacattgagatacgaagatcgtgaaatcgttattaataataatgagactggtgaaattactcaaaaattatacgacgtctatactggtattcaaaatggtactttagaagataaaaatggttggagagtcgttgtaccaaaatattaataaaaattgaatataatcatgaaaacaatatgcaaaagttaatcatgactaaaatccctttcaatgaagcgaagcatggtaataaattaagtttacaatgtttattgttaagtattgaaggggatttcacttattattatatttaattcaatatttaaatagaacaatactacgagttcattttcaggggataacgaatatcatagaatcagcataatacgaaataaataaataggagtattgatatcaatggaatggatattatttgataaagatggtacgttaattgaatttgatagaagttgggaaaaaataggggtacgatttgtacaatcattgcttgagactttcccagtacataataaagaagctgctttaagacaactcggtgtcattaaagaatctattgatccaaaatcagtgatgggttcaggatctttacaacaaattatccaggcatttaatgatgtgacgggacaagatacaaccgactggtccaagtcaacaagtcaaaagctggtagatgaacgtattcctgaaattaattgggtagaaggtgttaaagaagcacttatcgatttgaaagcaaaaggctatcaacttggtattgttacgagtgatactaaaaaaggtgtagaacaatttttagcacataccaatgctacctcgttgttcgatttgatcatttctaccgaagcggatgcctatgagaagccaaatcctaaagtattatcgcctttatttgagcaatataatgtagatcctcagaaagtagctatagtaggagacactgctaatgatatgaagacagcaagtaatgcaaatttaggtatggcaataggtgtattaacaggtattgcaacaaaagaagaattacatgaagctgatattattttaaatagtgcggcagatattttagaagctttaaattaaaaagaaagacatagtgtatatgtgaattaatgtattcgatagaattgataaaataatcgataatatctatggaatatacattgaatataaacatatacgctatgtctttagtcttttatcgtgtatctacttgtcgatatgtttgaataattcgagcaattttgtttatcataggatttaaagattcggggtccttatggatatcatattcattaatgttgatacgtaccacaggacatgcattaaagctattaatccaatcgtcatagcgtttaaatagctttttccagtattcagggtctgtattaatttccatttcgcgaccacgttcaataatacgatcaatgacctcatcatagttacattctaaataaatcattacatcaggtttaggaaaataaggtgtcatgaccatggcattaaataagtctgaatatgttttgaaatcttctttactcattgtgccttcttcttcatgcatttttgcaaaaatatcaacatcttcataaattgatcgatcttggacaaagccaccaccatattcaaacatacgcttttgttctttaaaacgttcagctaagaagtaaatttgcaaatggaaactccatcgttcaaaatcgctataaaatttatctaaatatggattatgttcgacattttcaaaagacgttttaaagtttaatttatctgcaagtgcttgcgttagtgttgattttccaacaccaactgtacctgcaatggttataatggcattttgtggaataccgtaattattcattggtaatatctcctatcataggtaatataatatgtaatatatcttcgtaatcttgttcatttttaagaaaatcaatagaagttgtatcgattaaaactacatttgaaccattactttgtaaggactcataatactcacgataatctttttttaactttaacagatattcatcttctatttgatgctcaaaactacggttacgtttagcaattctagattttaacacatcaaggtctgcatctaaaaagataatcatattcggcataatcatatcttcagttaaaatatcataaattttactgaatttctgaaattcaacagaactcaaagtatttttagcaaatatcttatttttatgtatatgataatcactaactacaccttgatttagttgtgttacatcttgaaattgcttatatctattgcataaaaagaacatttcagtttgaaaactccatttagagatatcttcataaaagtctgataaaaatggattttctgtgatgatttctttttcttcataaaaatctaaagtttgacttaatttgtgtgcaagtgaagatttacctacgccaataggaccttcaattgctataaaaggtttgttcatattcacatctccaaatgttaaaatagacattgagtattgtaccataagtgaggtatctggacataaatgacaaatgatatatattttatgacattagcgattgaagaagctaaaaaagcagctcaactaggcgaagtacctataggtgctatcatcactaaagatgatgaagttatcgctagagcacataatttaagagaaacactacaacaaccaacggcgcatgctgaacatattgcaattgaacgtgcagccaaagtgttaggtagttggcgtttagaaggttgcacattatatgtaaccttagaaccatgtgtcatgtgcgcaggaacaattgtaatgagtcgcattccaagagtcgtctatggcgcagatgatcctaaaggtggttgtagtggcagtttaatgaatttattgcaacaatctaattttaatcatcgtgcaattgttgataaaggtgtacttaaagaagcatgtagcacattattaacaacattttttaaaaacttaagagccaataagaaatccaccaattagacgatagtacatactaattaaaatttgttagaattacattatatgataaattaatgacaatataaatgttaatagaaaagtatgtgcgctgagtatatattcttatttaagaacaagattttaaatttacgaaacgaggtaacataatgataaaactaatagccactgatatggatggcacgctacttaatgcagcacatgaaatttctcaacctaatattgatgcgattaaatacgctcaagaacaagggataacggttgttatcgcgacaggtcgagcattttatgaagcacaagcaccagttgctgacacagatttaacagtaccatatatttgtttgaatggtgctgaagtacgtgatgaaactttcaatgtaatgagcacttcacaccttaataaatcgttagtacacaaaattacaaatgttttaaaagatgcaggtatttattatcaagtatacacgagtcgtgcgatttatactgaagatccacaaagagatttagacatttacatagatattgctgagcgtgcaggtcaacatgcaaacgttgagcgtattaaaaatggtattcaaagacgcatagataatggtacgttgaaagttgttgataattatgatgctattgaaaacatacctggtgaattaattatgaaaatattagcatttgatggaaatttagaaaaaattgacaaagctagtaaaattttagctgaatctccgaatttagctatatcatcatcttcgagaggaaatatagaaataacgcattcagatgcacaaaaaggtattgcgctagaaacaattgccgaaagattagggattgaaatgaaagaagtcatggcaataggtgacaatttaaatgacttatcaatgttagagaaagttggctatccagttgcgatggaaaatggtgcagaagaagttaaaaaaatagcgaaatatgtcacagatacgaatgaaaatagtggtgttggaaaagctattatgaaattattacgtgaacaacaagtttaataaaaaaagaggggtcaaatatgaaaggattaattattattggcagtgcacaagtgaattcacatacaagtgcactagcaagatacttaactgagcattttaaaacacatgatattgaagcggaaatattcgatttagcagaaaagccgttaaatcaattagatttttcaggaacaacaccgtctattgatgaaatcaaacaaaatatgaaagatttaaaagagaaagcaatggcggcggactttttaatattaggaacgccaaactatcatggttcatattctggaatattgaaaaatgcattagatcatctaaatatggattattttaaaatgaaacctgtaggcttaataggaaatagtggtggtattgttagttcagagccattgtcacatttaagagtaatcgtcagaagtttactaggcattgctgtaccaactcaaatagcaacacatgattctgattttgctaaaaatgaagatggttcatattacttaaatgatagtgaattccaattacgagcaagattatttgtcgatcaaattgtatcttttgtgaataatagtccatatgaacatttaaaataatattaaaaaatatgtaaatatacattaaaaataggtatgtagcttaaggtatttcattgagaatgcttttaagtcacatgcctattttttgttctaatgcaccaatagtaagcctttgagattactgttgtgagcaatgttattaattaaaataagatgtaatagcgaattgaaaacaagcttagattaaaagtgagttttaaaaatatagataaataatttaaagcaattaaagaaaaaaagtattaaaaattgaaattcttaaactgtgattcatattaatatttgtagcaaataacattgtaaaataaagaaaaataattaaagtattgcactttattgaaatttatattacgatagtaatgcagaaatttatatatgcaaaatattatatttatcaaattttgatattttaaaggagtattattaaatgaataataaaaagacagcaacaaatagaaaaggcatgataccaaatcgattaaacaaattttcgataagaaagtattctgtaggtactgcttcaattttagtagggacaacattgatttttgggttaagtggtcatgaagctaaagcggcagaacatacgaatggagaattaaatcaatcaaaaaatgaaacgacagccccaagtgagaataaaacaactgaaaaagttgatagtcgtcaactaaaagacaatacgcaaactgcaactgcagatcagcctaaagtgacaatgagtgatagtgcaacagttaaagaaactagtagtaacatgcaatcaccacaaaacgctacagctagtcaatctactacacaaactagcaatgtaacaacaaatgataaatcatcaactacatatagtaatgaaactgataaaagtaatttaacacaagcaaaaaacgtttcaactacacctaaaacaacgactattaaaccaagaacattaaaccgtatggctgtgaacacagtagcagcaccacaacaaggtacaaatgttaatgataaagttcatttttcaaatattgatattgctattgataaaggacatgtaaattcaacaactggcaaaactgaattttgggcgacttctagtgatgttttaaaattaaaagcgaattacaaaatcgatgattctgttaaagagggcgatacatttacatttaaatatggacagtatttccgtccgggttctgtaagattaccttcacaaactcaaaatttatataatgcccaaggtaatattattgcaaaaggtatttatgatagtacaacaaacacaacaacatatacttttacgaactatgtggatcaatatacaaatgttagcggtagctttgaacaagttgcatttgcgaaacgtgaaaatgcaacaactgataaaacagcttataaaatggaagtaactttaggtaatgatacatatagcgaagaagtcatcgtcgattatggtaataaaaaagcacaaccgcttatttcaagtacaaactatatcaataatgaagatttatcacgaaatatgactgtttatgtaaatcaacctaaaaatacatatacaaaagaaacattagtaacaaatttaactggttataaatttaatccagatgctaaaaactttaaaatttatgaagtaactaaccaaaatcagtttgtggatagtttcaccccagatacttcaaaacttacagatgtcactgataaatttaaaattacatacagtaatgataataagacggcgacagttgatttattgaatggtcaatctagtagtgataaacagtacatcattcaacaagttgcttatccagataatagttcaacagataatgggaaaattgattatactttagaaacacaaaatggaaaaagtagttggtcaaacagttattcaaatgtgaatggttcatcaactgcaaatggcgaccaaaagaaatataatctaggtgactatgtatgggaagatacaaataaagatggtaaacaagatgccaatgaaaaagggattaaaggtgtttatgtcattcttaaagatagtaacggtaaagaattagatcgtacgacaacagatgaaaatggtaaatatcagttcactggtttaagcaatggaacttatagtgtagagttttcaacaccagccggttatacaccgacaactgcaaatgcaggtacagatgatgctgtagattctgatggactaactacaacaggtgtcattaaagacgctgacaacatgacattagatagtggattctacaaaacgccaaaatatagtttaggtgattatgtttggtacgacagtaataaagatggtaaacaagattcgactgaaaaaggaattaaaggtgttaaagttactttgcaaaacgaaaaaggcgaagtaattggtacaactgaaacagatgaaaatggtaaataccgctttgataatttagatagtggtaaatacaaagttatctttgaaaaacctgctggcttaactcaaacaggtacaaatacaactgaagatgataaagatgccgatggtggcgaagttgatgtaacaattacggatcatgatgatttcacacttgataatggttactacgaagaagaaacatcagatagcgactcagactcagatagcgactcagattcggacagcgactcagactcagatagcgactcagattcggacagcgactcagattcggacagcgactcagactcagatagcgactcagattcggacagcgattcagactcagatagcgactcagattcagacagcgattcagactcagatagcgactcagattcagacagcgactcagattcagatagcgattcagattcagacagcgactcagactcagacagtgattcagattcagatagcgattcagactcagacagcgattcagactcagatagcgattcagactcagactcagacagcgattcagattcggatagcgactcagactcagatagcgactcagattcagacagtgactcagactcagacagcgactcagattcagatagcgattcggactcagacaacgactcagatagcgattcagattcagacaacgactcagatagcgattcagattcagacaacgactcagatagcgattcagattcagatgcaggtaaacatactccggctaaaccaatgagtacggttaaagatcagcataaaacagctaaagcattaccagaaacaggtagtgaaaataataattcaaataatggcacattattcggtggattattcgcggcattaggatcattattgttattcggtcgtcgtaaaaaacaaaataaataatatgattaacttaaccaggtccatgtggcctggttttttctgtttagaaattcccagatataaaacaaaaaatctttaaggaatagatgcaatttaatttgttacagaaatgtaattgtctatgaattagaaaagctaagatattaattttaagggcaaataatactattttttatgataattaaataaagattacaaaactcataaaaacttttatttaaacacaaatgttaaataacgttttacgataaagaaaaataattaaagtattgtgatttatctaaaaatgtaatactatattgatatacatttttgtatttaaaacaattgtattatttaaaaatttgatgaattaggagtaatctaatgctaaacagagaaaataaaacggcaataacaagaaaaggcatggtatccaatcgattaaataaattttcgattagaaagtacacagtgggaacagcatcaattttagtaggtacaacattaatttttggtctggggaaccaagaagcaaaggctgcagaaagtactaataaagaattgaacgaagcgacaacttcagcaagtgataatcaatcgagtggtaaagttgatatgcagcaactaaatcaagaagacaatactaaaaatgataatcaaaaagaaatggtatcatctcaaggtaatgaaacgacttcaaatgggaataaatcaatagaaaaagaaagtgtacaatctaccactggaaataaagttgaagtttcaactgccaaatcagatgagcaagcttcaccaaaatctacgaatgaagatttaaacactaaacaaactataagtaatcaagaagcgttacaacctgatttgcaagagaataaatcagtggtaaatgctcaaccaactaatgaggaaaacaaaaaggtagatgccaaaactgaatcaactacattaaatgttaaaagtgatgctatcaagagtaatgctgaaactcttgttgataacaatagtaattcaaataatgaaaataatgcagatatcattttgccaaaaagtacagcacctaaacgtttgaatacaagaatgcgtatggcagcaatacaaccaaactcaacagattctaaaaatgttaatgatttaatcacatcaaatacaacattaactgtcgttgatgcagataatagcaaaacgattgtaccagcccaagattatttatcattaaaatcacaaattacagttgatgacaaagttaaatcaggtgattatttcacaattaaatactcagatacagtacaagtatatggattgaatccggaagatattaaaaatattggtgatattaaagatccaaataatggtgaaacaattgcgactgcaaaacatgatactgcaaataatttaattacatatacatttacagattatgttgatcgatttaattcagtaaaaatgggtattaattactcaatttatatggatgcagatacaattcctgttgacaagaaagatgttccttttagtgtaactattggaaatcaaattacaactacaacagcagatatcacttatccggcttataaagaagctgacaataattcaataggatcagcttttacagagacagtttctcatgtaggaaatgttgaagaccctggttactataaccaggtagtatatgttaatcctatggataaggatttaaaaggtgctaagttaaaagttgaagcgtaccatccgaaatatccaactaatattggtcaaattaatcaaaatgttacaaatataaaaatatatcgtgttcctgaaggatatacattgaataaaggatatgacgttaatactaatgatttggtagacgtaactgatgaatttaaaaataaaatgacgtatggatcaaatcaaagtgttaatcttgattttggtgatattacatcagcatatgttgtaatggttaatacaaaattccaatatacaaatagcgaaagcccaacacttgttcaaatggctactttatcttcaacaggtaataaatccgtttctactggcaatgctttaggatttactaataaccaaagtggcggagctggtcaagaagtatataaaattggtaactacgtatgggaagatactaataaaaacggtgttcaagaattaggagaaaaaggcgttggcaatgtaactgtaactgtatttgataataatacaaatacaaaagtaggagaagcagttactaaagaagatgggtcatacttgattccaaacttacctaatggagattaccgtgtagaattttcaaacttaccaaaaggttatgaagtaaccccttcaaaacaaggtaataacgaagaattagattcaaacggcttatcttcagttattacagttaatggcaaagataacttatctgcagacttaggtatttacaaacctaaatacaacttaggtgactatgtctgggaagatacaaataaaaatggtatccaagaccaagatgaaaaaggtatatctggcgtaacggtaacattaaaagatgaaaacggtaacgtgttaaaaacagttacaacagacgcagatggcaaatataaatttactgatttagataatggtaattataaagttgaatttactacaccagaaggctatacaccgactacagtaacatctggtagcgacattgaaaaagactctaatggtttaacaacaacaggtgttattaatggtgctgataacatgacattagatagtggattctacaaaacaccaaaatataatttaggtaattatgtatgggaagatacaaataaagatggtaagcaggattcaactgaaaaaggtatttcaggcgtaacagttacattgaaaaatgaaaacggtgaagttttacaaacaactaaaacagataaagatggtaaatatcaatttactggattagaaaatggaacttataaagttgaattcgaaacaccatcaggttacacaccaacacaagtaggttcaggaactgatgaaggtatagattcaaatggtacatcaacaacaggtgtcattaaagataaagataacgatactattgactctggtttctacaaaccgacttataacttaggtgactatgtatgggaagatacaaataaaaacggtgttcaagataaagatgaaaagggtatttcaggtgtaacagttacgttaaaagatgaaaacgacaaagttttaaaaacagttacaacagatgaaaatggtaaatatcaattcactgatttaaacaatggaacttataaagttgaattcgagacaccatcaggttatacaccaacttcagtaacttctggaaatgatactgaaaaagattctaatggtttaacaacaacaggtgtcattaaagatgcagataacatgacattagacagtggtttctataaaacaccaaaatatagtttaggtgattatgtttggtacgacagtaataaagacggcaaacaagattcaactgaaaaaggtatcaaagatgttaaagttactttattaaatgaaaaaggcgaagtaattggaacaactaaaacagatgaaaatggtaaatatcgtttcgataatttagatagcggtaaatacaaagttatttttgaaaagtctgctggcttaacacaaacaggtacaaatacaactgaagatgataaagatgcagatggtggcgaagttgacgtaacaattacggatcatgatgatttcacacttgataacggatacttcgaagaagatacatcagatagcgactcagattcagatagcgattcagattcagatagcgactcagactcagacagcgactcagattcagacagcgactcagactcggatagcgattcagattcagacagtgattcagattcagacagcgattcggattcagacagcgactcagacacagatagcgactcagactcagacagcgactcagacagtgattcagactcagatagcgattcagattcagacagcgactcagactcagatagtgactcagattcagatagtgactcagactcagacagtgattcagactcagacagtgattcagactcagatagcgactcagactcagacagcgactcagactcagatagtgactcagattcagatagcgattcggactcagacagtgattcagattcggacagcgactcagactcagacagtgattcagactcagatagtgactcagattcggacagcgattcagactcagatagcgactcagattcagacagtgattcagactcagatgcaggtaagcacacacctgttaaaccaatgagtactactaaagaccatcacaataaagcaaaagcattaccagaaacaggtaatgaaaatagcggctcaaataacgcaacgttatttggcggattattcgcagcattaggatcattattgttattcggtcgtcgtaaaaaacaaaataaataatacagcttataccaggtccgtgaggcctggttttttatttcaaaatttatgaaatgtatcttatgtttgagattaaatagtgcaattttttaaaaaatataacataaatcaacataaatttaattcatctttacattaaaagtacaaacgaataagaaaagcaattaaacacagcatcaaaccatttaaaacaattgatataaaagacaaacgaataattaaaaattactagaattaatttattcaaaccaaagtgtaaaataacagtcttagataaataaatttatttaaagtattgtgctttatctaaaaatgtattacgatgggaatacaaatttttatatgtaaaaatattaattttttgcaaatattgatattttaaaggagatttatatgattaacagggataataaaaaggcaataacaaaaaagggtatgatttcaaatcgcttaaacaaattttcgattagaaagtatactgtaggaactgcatcgattttagtaggtacgacattgatttttggtctagggaaccaagaagctaaagctgctgaaaacactagtacagaaaatgcaaaacaagatgatgcaacgactagtgataataaagaagtagtgtcggaaactgaaaataattcgacaacagaaaataattcaacaaatccaattaagaaagaaacaaatactgattcacaaccagaagctaaagaagaatcaacttcatcaagtactcaaaaacagcaaaataatgttacagctacaactgaaactaagcctcaaaacattgaaaaagaaaatgttaaaccttcaactgataaaactgcgacagaagatacatctgttattttagaagagaagaaagcaccaaataatacaaataacgatgtaactacaaaaccatctacaagtgaaattcaaacaaaaccaactacacctcaagaatctacaaatattgaaaattcacaaccgcaaccaacgccttcaaaagtagacaatcaagttacagatgcaactaatccaaaacaaacggtaaatgtatcaaaagaagatcttaaaaatgatcctgaaaaattaaaagaattagttagaagtgaaaataacactgatcgttcaactaaaccagttgctacagctccaacaagtgttgcaccaaaacgtgtaaacgcaaaaatgcgctttgcagttgcacaaccagcagcagttgcttcaaataatgtaaatgacttaattacagttacgaaacagacgatcaaagttggcgatggtaaagataatgtggcagcagcgcatgacggtaaagatattgaatatgatacagagtttacaattgacaataaagtcaaaaaaggcgatacaatgacgattaattatgataagaatgtaattccttcggatttaacagataaaaatgatcctatcgatattactgatccatcaggagaggttattgccaaaggaacatttgataaagcgactaagcaaatcacatatacatttacagattatgtagataaatatgaagatataaaagcacgtttaactttatactcatatattgataagcaagcagtacctaatgaaactagtttgaatttaacgtttgcaacagcaggtaaagaaactagccaaaacgtttctgttgattatcaagacccaatggttcatggtgattcaaacattcaatctatctttacaaagttagatgaaaacaaacaaactattgaacaacaaatttatgttaatcctttgaaaaaaacagcaactaacactaaagttgatatagctggtagtcaagtagatgattatggaaatattaaactaggaaatggtagtaccattattgaccaaaatacagaaataaaagtttataaagttaaccctaatcaacaattgcctcaaagtaatagaatctatgattttagtcaatacgaagatgtaacaagtcaatttgataataaaaaatcatttagtaataatgtagcaacattggattttggtgatattaattcagcctatattatcaaagttgttagtaaatatacacctacatcagatggcgaactagatattgctcaaggtactagtatgagaacaactgataaatatggttattataattatgcaggatattcaaacttcatcgtaacttctaatgacactggcggtggcgacggtactgttaaacctgaagaaaagttatacaaaattggtgactatgtatgggaagacgttgataaagacggtgtccaaggtacagattcgaaagaaaagccaatggcaaacgttttagttacattaacttacccggacggtactacaaaatcagtaagaacagatgctaacggtcattatgaattcggtggtttgaaagacggagaaacttatacagttaaattcgaaacgccagctggatatcttccaacaaaagtaaatggaacaactgatggtgaaaaagactcaaatggtagttctgtaactgttaaaattaatggtaaagatgatatgtctttagacactggtttttataaagaacctaaatataatcttggtgactatgtatgggaagatacaaataaagatggtatccaagatgctaatgaacctggtatcaaagatgttaaggttacattaaaagatagtactggaaaagttattggtacaactactactgatgcctcgggtaaatataaatttacagatttagataatggtaactatacagtagaatttgaaacaccagcaggttacacgccaacggttaaaaatactacagctgaagataaagattctaatggtttaacaacaacaggtgtcattaaagatgcagataatatgacattagacagtggtttctataaaacaccaaaatacagtttaggtgattatgtttggtacgacagtaataaagacggtaaacaagattcaactgaaaaaggtatcaaagatgttaaagttactttattaaatgaaaaaggcgaagtaattggaacaactaaaacagatgaaaatggtaaatatcgtttcgataatttagatagcggtaaatacaaagttatttttgaaaagcctgctggcttaacacaaacagttacaaatacaactgaagatgataaagatgccgatggtggcgaagttgacgtaacaattacggatcatgatgatttcacacttgataacggatacttcgaagaagatacatcagacagtgattcagactcagacagtgattcagactcagacagcgactcagattcagacagtgattcagactcagacagcgactcagattcagacagtgattcagactcagatagcgattcagattcagacagcgactcagactcagatagcgactcagactcagacagcgactcagactcagacagtgattcagactcagacagcgactcagattcagacagcgactcagactcagatagcgactcagattcagacagtgactcagactcagatagcgactcagactcagacagtgactcagactcagacagcgattcagattcagatagcgactcagattcggacagtgattcagactcagatagcgactcagattcagacagcgactcagactcagatagcgactcagactcagacagtgattcagactcggatgcaggaaaacatacacctgttaaaccaatgagtactactaaagaccatcacaataaagcaaaagcattaccagaaacaggtagtgaaaataacggctcaaataacgcaacgttatttggtggattatttgcagcattaggttcattattgttattcggtcgtcgcaaaaaacaaaacaaataatacaatatgacccaggtccttgtggcctggtttttttatgattacacatgcaatagatgtatttttcatataaaataaacaataaagatacggaataaaacttatatgaggcgataatatgaattacattttaggaacaattttagaaagtaaaattacaggtgtagaaaaagcgcaaataaatagattgaagttgttcaaacaacacggcatatcttcaaaatgtgtatatgttaaatggaatccttattcatacacatatgcgaagcaacatcagattgaaaatgatgtatttacaatgtatgactattttcaaaaagcaatcaattataaaaagacaaagcaagttaactggatacagtattgggaaaagtcatgtaggtacacattgaaatttgtggaaaattcaaatgatgtcagaatatatgatgaagagcaatttgtaatgtatgcacattttttagataaacagtatcatcatttaaactatgtgaattattttgatcataaaagaagaaaagtaaaacgcgaattgtatgatggaagaggctttttaagttgttctcgaattttaggtgaaggacaacggattgtactcgaaaattactatacacctaatggggaaatcgtcatccaaaaatatttcgacgatataaaagggaaaaacacgctcacaaaggttatcttaaatgaagaccagcatcaacaattttttgatacagaagatgaattagttcaatattttctccatcaattatgtaaaaataatgatcaaatcatattagatcgtcctcatgaattaggaaatgttatagcgggattaaatcaaagtattccagttattgttgtgctccacagtacacatttagccgacaccggtaatggtataaaaagtttttataaaacagtgtttaataatttaacacgttataaagcgattgttgtatcaacagaacagcaatgccaagatatttcacaatatattgaaaataaaataccagttatcaatattccggttggctacgtggcaaatttaaagtatcaatttgacatcaatcaaaaggagaaaaatcatatcatatcaattgctcgcctcgttgaaaataaacaaattaaacatcaaattgaagtgatcaagcaattagtaacaaaacatcccaatattcaattgaatatttatggacatggaaatggtttgtcagaatatcgacaacttgtagaagattatcatttatcggaacatgttaaatttcatggttttaagacgcatattaatgaagagattgctaaagcagaactgatgctatcgacaagtaaaatggaaggttttggcttagcaattttagagtcgctttcagtaggtacaccagtgatcagttatgatgtagattatgggccatcagaactgattcaagatggatttaatggctatttagtacctcaaggtgacatcaatcaaatggttgaaaaggtcgatcaattactaattaatactcaaaaattgcaacagttttcgattaatagtatagagtatgctcagcaatttaatgagacaaatgttagtacaaaatggcaaaatattttaaactaagtcaaaagaaaaaagcattttcctagaatcatctatttaacaaacctcgttcatacgaacttacatgtttagttaaatgacataggaaaacgcttttttttataaaaaataaaggtgaagtacatttatataagacgaacaaattggtcccattgtttaattaacgacgctttactatattgttgcgcttttgccaaactaccttttgacagtcgttgttgtacttcaggatgatcaatcacatattttactttatcaaatagggcatcttcatcatttttagtaattaaataaccattgaaatcaggcgtaattaattcgttaggtccatatttaatatcataactaataactggaacaccatgtgctaaagattcaagtagcgctaaagagaaaccttccatgttacttgttattaaactcaaataggcatcgctatattcttggtctagattgcttaaaaagccgcgtaagtaaacatgattttccaatccatatttttgtatcaattcatttaattttttactttcagaaccaaaaccatacatatgaagctctatttttgggacatacgatactaagcgtttaattaattcaatttgttgatgtaattgtttttcaggtgaataacgagcaacggaaattaatttaacactgcgctgatctaatgtttggactggtgtatcaattgtttcactatagccgacaggaatattaacaactggaatagtatggttaatacgtttttcaacatctaatttttgctgctcagtagaaacgataattgcacgatatcgagataaattttcaaacatcgctttatatacatttttaaatggcgatgaatctaatgcatcaatatttttaatgtgtgtactgtgaagcacagctactactgggattgactcaggcgttaagttgaaaataggtgctgtgtacacattacggtcactgaaaaataaatccccatgttgatatagttgtttaatgaaaaatgcgcctaattccgtttcattattaaagaaatattgtttgttagcatagtaaacaataattttttgtacttctggtttgccatctttgtaagaaaaatacttttctaattttgtgtcaccttctggattatagaaaaattcacataatgtttgttgtttatcaacaagaatcctactacaacttaaaaagccacgcacatcataaaaatcacgttttacttttcgtctttgactatcaaaatgattcacataatctaatatacgatatttaggatcttgaaaatgggcatacattaagaaacgctcttgatcatatattctaaagtcatgactattttcaacatgttttaaagtataatgacattcatcagtccaatacgacaaccagtcaaatggttcattgcgttctaaatatgttgcttcttggaagaaatcatacatattaatatagtcagaactagtaatataattttgggcatttctatataaatatctattccatgacagaaatacacattgcgctggtcttcccatttctttaaataaatttaaacgattaataattgctttttctatcccagttaaattaacacctaaactattacctacaaaataattcatttacaacaccacttatatctattttttataattatatcacataatatttaattacttcttttaactggatgatgtgtttatttataaaacaacaaattttgatatttataatgatagtagttattcaatcaactacgaccaatatatcattgtagagcttaggatattgatttatgcctcaggcacatcaaatgagaagatttataaaagagatatacaactctagaaggtataataaaaacgcgcaactaatgttacgcgtttgaattaatcatatgatattatttgcgatactttaatttagcgaaagcatcatgttgatggatagactcttcattacgacattcgatatcgaaaccgtctaaccaatcaaatccaactaagtccgcggcaattaaacgaattaagtcttcgacaaaacgtggattttcatatgcacgctctgtcacacgtttttcatcaggacgttttaaaatagggtatagaattgaacttgcattagcttccattgcatctaaaattttatttttatagtcatcaactatgtcttgatctttattaatatatgttttaacagtgacaacaccacgttggttgtgcgctgaatactcacttatttcttttgaacaagggcatagcgttgtgacagttgcttcaatagtaagttctttacgtgtaactttatcaccgtcaattgctaatccataagtgacatcggcattaccaactgctttaatatttgtggttggactatagcgatcaaagaaccatttcccagaaacatcaacgcctgccgcattttgtttcatattcgtttgtaaagtgcgtaacacctgataaagtgtattaaattcaagttcaataccattatcatagtgcttttcaacactttcaattatacggctcatattaatacctttttcgtcttttgttaaacttgttgaaaaactaaatgtgccagctgtttgatactggtcaacaagtacagggtacactaagtttttaataccaacttcttctatttcaaataaaaaatctttatgtgtactttgtaaatctgtcatttcgttcttagtagtaggtttcgtgccttcaataggatctacggaaccaaagtgtttccaacgaccttctcgtgtcgataaatcaaattcagtcatttttttcctccgttaagatttaaagtgatatgtccaatatggttcgactgttaaaaagctgtgttgtttaccatcgatttcaggacttgctaattgttttaaaaatggacctgtttgagaagcatgtgcttcaaatgccttaattttaagttctttaaaatctgtaatatcattttgaatatcaggttctccaagagcttcagttgcatcattactgaacgcaactaaagttaaacgagggcgttcttctttaggcatgcgttcaaccgttcgaattacagcgtctgctgttgcttcgtgatcaggatgtactgcatatccaggataaaatgaaataatcaatgatggatttgtatcatcgattaaagatttaatcataccatctatatgttcatagggttcaaattcgacagttttgtcacgtaaacccatttttcttaaatcagtaataccgataactttacaagcttcttctagttcacgctcacgaatacttggtaatgattcgcgtgttgcaaatgggggattacctaaatttctgcccatttgtcctagggttaaacatgcatatgttacaggtatgcctttttggatataacttgctaatgtgcctgcagatgagaaggtttcatcatcaggatgtggaaatattactaatacatgtctttcgtcagtcatgttgatgcctcctctataaattaaatggtcgctcactaatttgaagtgctgcagcgagttgaccttcgtaattaaaacctgcaattaaaaattcatcatgctcattgacctcaaaatgcgttagaccttgtacataaacccaaccaccatttgatagtttaagaccaatgcgataaggttctttattaccaccttttagttgtgcatgcgtatatgttatttgtatgtttcttaaaaaagtaccagcattaaaaacacgttgatcgaaatggttcgcataggccccatttgtcgtttcaacatgcagatacacaggtttatgttcaaaagaagcaagtaaatctataacttcttgttctttaattggttccaacacgttcactccttacactatcaatgtgtttatctttctattttactaaaaactattcgataattgtatacgattgctcaattatttataaattaattttcatgaagggtaattactcaggattacgtaatcatacagcattagttttttacttttaaaaatcaaaaatttgttggaatttgaaaagtgttaaacattaaaaatgatgctatattaatggtgtatgaatgaattcataagtttttaaaatgtattaaatttgtggaggcatgtaaacaatgaaagtattaaacttaggatcgaaaaaacaagcatcattctatgttgcatgtgagttatataaagagatggcatttaatcagcactgtaaactaggtttagcaactggtggtacaatgacagatttgtatgaacaacttgttaagttattaaataaaaatcagttaaacgtagacaatgtatccacgtttaatttagacgaatatgtaggtttaaccgcatcacatccgcaaagttatcactattatatggatgacatgcttttcaaacaatatccttattttaatagaaagaacattcatattccaaatggagatgccgatgatatgaatgcggaagcgtcaaaatataatgacgttttagaacaacaaggtcaacgtgatattcaaattttaggtattggtgaaaatggtcatattggatttaatgaacctggtacgccgtttgatagcgttactcatatcgttgatttgactgaaagtactattaaggctaatagtcgatattttaaaaacgaagatgatgttccaaagcaagccatttcgatgggacttgctaatattcttcaagccaaacgtatcattttactcgcatttggtgaaaagaaacgtgctgctattacacatttattaaatcaggaaatttctgttgatgttccagccacattacttcacaaacacccgaatgttgagatatatttagacgacgaagcttgcccgaaaaatgttgcgaaaattcatgtcgatgaaatggattgattgcaatgtttaattaagaaatgcctcgggaaaggttccaatagaaagataaaaagcattggaaggatgatttttagtggaattacaattagcaattgatttattaaacaaagaagacgcggctgagttagcaaataaagtaaaagattatgtagatatcgtagaaatcggtacgccaatcatttacaacgaaggtttaccagcagttaaacatatggcagacaacattagtaatgtaaaagtattagcagacatgaaaattatggatgcagctgattatgaagttagccaagcaattaaatttggcgcggatgtaattacaatactaggtgttgcagaagatgcatcaattaaagcagctattgaagaagctcataaaaataataaacaattactagttgatatgattgctgttcaagatttagaaaaacgtgcaaaagaattagatgaaatgggtgcggattatattgcagtacacactggttatgatttacaagcagaagggcaatcaccattagaaagtttaagaaccgttaaatctgttattaaaaattctaaagttgcagtagcaggtggaattaaaccagatacaattaaagaaattgtcgctgaaaatcctgatcttgttattgttggtggcggaatcgcaaatgcagatgatccagtagaagctgcaaaacaatgtcgcgctgcaatcgaaggtaagtaatatggctgaatttagtgactatcaattaattctagatgaattaaagatgactttgtcacatgttgaagcggatgaattttcaacgtttgcgtccaaaatactacatgctaaacatatatttgtagctggcaaaggacgttcaggattcgtggcgaatagctttgcaatgcgcttaaatcagctcggcaaaaaggcacatgttgttggagaatcaacgacacctgcgattaagtcgaatgatgtatttgtaattatctctggttcaggttccacggaacatttaagattattagcagacaaagcaaaatcagtaggtgctgacatcgtattaattactacaaataaagattctgcaataggcaatctagctgggacgaacatcgttttgcctgcaggtacaaaatatgatgaacaaggctcggcacaaccattaggaagtttgtttgaacaagcatcacaattatttttagatagtgttgtaatgggattgatgactgaaatgaatgtaacggaacaaacgatgcaacaaaatcatgctaatttagaataaaacaaagatagtcgataatatgatgcctaggcagaaatattatcgattatttttttatttaaataataaactatagtataatatcaataataaacgaatagaggtgttaatattgaagtttgacaattatatttttgattttgatggtacgttggcagacacgaaaaaatgtggtgaagtagcaacacaaagtgcatttaaagcatgtggcttaacggaaccatcatctaaagaaataacgcattatatgggaatacctattgaagaatcatttttaaaattagcagaccgaccattagatgaagtagcattagcaaagttaatcgatacatttagacatacttatcaatctattgaaaaggactatatttatgagtttgctggcataactgaagccattacaagtttatataaccaagggaaaaagcttttcgtggtgtctagtaagaagagtgatgtattagaaagaaatttatcggctatagggttaaatcatttaatcaacgaagctgttggatccgatcaagtaagtgcatataaaccaaaccctgaaggcatacatacaattgtgcaacgctacaatttaaatagccaacaaacggtgtatattggtgattcaacgtttgatgttgagatggcacaacgtgctggtgtgcaatctgcagctgtcacttggggtgcacatgatgcaaggtcattacttcattcaaatccggattttataatcaatgatccatcagaaattaatacagtattataaaatttgttaaaacagagaataccatggttaaaatgcatattcataaatattagattatacttagaaatatttcgctttagattaggaatttaaaataaatatttattaaacattatgaatttttaaagagtaatgtctgactcgttgataatttatttttgtaaaaataaattaaagtaatgacaaagttattgaagtaaattgagtataaacatttaaatacgatgtcgaaaatggcgatagcatatcacttacatgaagttgtgtgctatcgctatttttagttataattccaaaaagttaatcgttcgatgatttaagaattattattgtttaattcaaatgtatgagggtataaaatcattgaatttaattcgataaagcgaaatttttgaacaaacatacttttgtatttatataaaaatttaaattcttataaatttgacaaaactaattaactccgtataattatgaaacatacaagagggagtgtatgaattcatggattttaataaagagaatattaacatggtggatgcaaagaaagctaaaaaaaccgttgttgcaaccggtatcggtaatgcaatggaatggttcgattttggtgtctatgcatatacaactgcgtacattggagcgaacttcttctctccagtagagaatgcagacattcgacaaatgttgactttcgcagcattagccattgcgtttttattaagaccaattggtggtgtcgtatttggtattattggtgacaaatatggacgtaaagttgtattaacatctacaattattttaatggcattttcaacattaaccattggattattgccaagctatgatcaaattggactttgggcaccaatactattattgcttgcaagagtactacaagggttttcaacaggtggagagtatgcgggggcaatgacatatgttgccgaatcatctccagataagcgtcgtaactcattaggtagtggactagaaattgggacattatcaggttacatagctgcttcaattatgattgctgtattaacattctttttaacagatgaacaaatggcatcatttggttggagaatcccattcttactcggtttattcctaggattattcggcttatatttacgtcgtaagctggaagaatcaccagttttcgaaaatgatgttgcaacacaaccagaaagagataacattaactttttacaaatcatcagattttattacaaagatatatttgtatgttttgtagctgttgtattcttcaatgttacaaactatatggtaactgcatatttaccaacctatttagaacaagttattaaattagatgcaacgacaacaagtgtattaattacttgtgtcatggcaataatgattccattagcattaatgtttggtaagttagcggataaaataggtgaaaagaaagtatttctaattggtactggtgggctaacattattcagtatcatcgcatttatgttattacattcacaatcatttgttgtaatagtaatcggtatatttatattaggatttttcttatcaacttacgaagcgacaatgccagggtcgttaccaacgatgttttacagtcatataagatatcgaactttatcagtaacatttaatatctctgtttcgatatttggtggtacgacgccattagttgcaacatggttagttacgaaaactggagatccattagcacctgcgtattatttaacagcaatcagtgttattggctttttagttattacattcttacatttaagtacagcaggaaaatctctaaaaggttcgtatccaaatgtagataacgagcaagatagagcttattatgcagaacatccaaaagaagcattatggtgggttaaagaacgtaagaattagagattttaataaaaagtataaatcaatcgtatataagcactttaaagctagtaggttctgctaactttaaagtgctttttaaattgagaactgtaattagccgtaataaagtttttgtatatacataaacccccactgcaatgattatcgcaatgggggaaagaggggacttaaagcatatgtttagctttgaatacttaaaattctcttgctattgaaatgttaggatgtaaatatgtcttagagtattttgtccaacgcaattaatattgagactctaaccttcaatattattatagagaacacaaacttaaatagattgggtgacttatttgtgtcagttattgcgattgcgataacttcttttctctatatacatatagtaacgtcttatctaataaaaaacatggtactacagtatcaaatttatctagggcttaagtttgatttttataataggcaggtttacctgataaaaatacttattcattatataatgttaacaatatgtattttaaagtttacattgagtgagggatattgatgaacgtaattttagaacagttgaaaacacatactcaaaataaacctaatgacatagcattacatatcgatgatgaaacaattacatatagtcaactaaatgcccgcatcactagcgcagttgaatctttgcagaaatattcacttaaccctgtcgttgctattaatatgaaatcaccggtgcaaagtattatttgttatttagctttgcatcgtttacataaagtgcctatgatgatggaaggtaaatggcaaagtactatacatcgtcaattgattgaaaaatatggtattaaagatgtaattggagatacaggtctcatgcagaatatagaatcaccgatgtttattgattcaacgcaattacagcactaccccaatttattacatattggttttacttcagggacaactggactgccaaaagcatattatcgtgatgaagattcatggttggcttcttttgaagttaatgaaatgttgatgttaaaaaatgaaaatgcaatagcagcccctggaccactatcgcactcgttaacattatatgcgttattgtttgctttaagttccggtcgtacttttataggacagaccacttttcatcctgaaaagttacttaatcaatgtcataaaatatcatcatacaaagttgctatgtttcttgttccaacgatgattaaatcattattgttagtttacaacaatgaacatacaatccaatcattttttagcagtggagataagctgcattcttctatttttaaaaagataaaaaatcaagcaaatgacataaatttgattgaattttttggtacatcggaaaccagttttatcagctataacttgaatcagcaagcaccagttgaatcagtaggtgtgctatttccaaatgtggaattgaaaacaacgaatcacgatcacaatggtataggaactatttgtataaaaagtaatatgatgtttagtggctatgtaagtgaacaatgtataaataatgatgaatggtttgttactaatgataatggctatgtaaaagagcagtatttatatttaacgggacgtcaacaggatatgttaattattggtggtcaaaatatatatccagcacatgttgaacgccttttaacgcaatcttcgagcattgatgaagcaattatcatcggtattccaaatgagcgttttggtcaaataggcgtattgctttattctggtgatgtgacacttacacataaaaatgtaaaacaatttttaaaaaagaaagtgaaacgctatgaaattccatcgatgattcatcatgtagaaaagatgtattacactgcaagtggtaaaattgctagagaaaaaatgatgtcgatgtatttgagaggtgaattataatatgaatcaagcagtcatagttgcagctaaacgaactgcatttgggaaatatggtggcactttaaaacatttagagccagaacaattgcttaaacctttattccaacattttaaagagaagtatccagaggtaatatctaaaatagatgatgtagttttaggtaatgttgttgggaatggtggcaatattgcaagaaaagcattgcttgaagcggggcttaaagattcaatacctggcgtcacaatcgatcggcaatgtgggtctggacttgaaagtgttcaatatgcatgtcgcatgatccaagccggagctggcaaggtatatattgcaggtggtgttgaaagtacaagtcgagcaccttggaaaatcaaacgaccgcattctgtgtacgaaacagcattacctgagttttatgagcgtgcatcatttgcacctgaaatgagcgacccatcaatgattcaaggtgctgaaaatgtggccaagatgtatgatgtttcaagagaattacaagatgaatttgcttatcgaagtcatcaattgacagcggaaaatgtaaagaatggaaatatttctcaggaaatattacctataaccgttaaaggagaaatattcaacactgatgaaagtctaaaatcacatattccgaaagataactttggccgatttaagcccgtgatcaaaggtgggaccgttaccgctgcgaatagttgtatgaaaaatgatggtgcagttttattgcttattatggaaaaagatatggcatacgaattaggtttcgagcatggtttattatttaaagatggtgttacggtaggtgttgattctaattttcctggcattggtccagtaccagccatttccaacttactaaaaagaaatcaattaacgatagaaaatattgaagtcattgaaattaacgaagcgttcagtgcacaggtagttgcctgccaacaagctttaaatatttcaaatacgcaattaaatatatggggtggtgcattagcatcaggtcatccatacggtgcaagcggtgcccaattagtgactcgattattttatatgtttgacaaagagactatgattgcatctatggggatagggggaggtctaggaaatgcagcattattcactcgattctaaccagcgattaaatgtgtcattttctaaggatagtgtggctgcatattatcagtgttttaaccaaccttatagaaaagaagtaccaccattaatgtgtgcgtcattatggtcaaaatttgatttatttaaaaaatatgcaaatagcgaactgattttaacaaaatcagcaattaatcaaactcaaaagatagaagtagacacaatatatgtagggcatttagaagatattgaatgccgacagattcacaatatcacacgttatacaatggctttaacattaactaaaaatgatcaacatgtcataacggttacacaaacttttattaaggcgatgaagtagagatgaagtttaatgagatatggataaatgaatatttggcgctcgtaaatgatgataatccaatacataatgagattgtgccaggacaattagtgagtcaaatgatgctgatggctatgtcattagagacaaaccagtgtcaaattaactacgttaaacctattttaataaatgaaaatatcgaattcattgaacaacacgagcaagaaattatagcaattaatgacgatggagagattaaaataaaaatttctttgagcacaaaaaaataaccgatattagctgcatgaacgcatattaattaggagatgaaaggacagctaatatcagttatgtattgttattattattgggaacagagatgaatataggttacgtttctttctttgcacggggatgcattaatctaaaataataataacaactatatcaatgtttaataaattctggattattggaacgattagtcaatttaactaactttcatatgatctatatcgtcttgtaataaagagagcaatttgaatatttcagtatcactaaatgaatcgtcacatttaattgaaacatgctgaaacgttttggttataatttcataaactggtgcgccttcatggtgatactgtcgataaataatcataacctatattacctcctttgctactctatggttatattataaataacatttttatgtgtgacatcaaccttaagtatcaactttttatcagacatagaacgtatgatttactaagactatttatgtataaaagttctaaataaatatatatttatagagtcgcctggcagtcatttgggaaatataacatatatgattagagaggcatctatcgcaaaagaatgataatgatagaggtattgagcatatagatgagtttaagttcatcttgaaaataaagggttatttagtcatagatgtagatgtataggaaatatttgtatgtattgttcgatatgtatgaaattttcaataaaagctaataacgcttatatgtaactttcaaatttaaattatatacagagcatgatgattataaaaaataaccacatcacataaattgagttcatacccaatttaagtggtgtggctaataatgttgatttatagatgaaccgcctaatcgttaaacctctgttacttcaacatcgatatgttcaatacggttgtatgcaccgtgatccacaggaccaacaaaatcattcattttccaaccgtttttaatagcagaagcgacgaaagctttcgcgctaatcacagcttctttcggtgacttaccgttagctaaatatgcagttgttgccgcagcaaatgtacaaccagcaccatggttataactttgttggaacatgtctgttgttagttgataaaatgtttgaccatcatagtataagtcatacgatttatcttgatctaaagctttgccacctttaatgatgacatgctgtgcgcctttatcaaaggtaattgttgcagcctttttcatatcttcaattgaatttaatttacctaatcctgataattgacccgcttcaaataagtttggtgtcactaccgttgctttaggtagtaaatatttaatcatcgcctcagtatttccaggattaagcacttcatcttcgcctttacaaaccatgacaggatctactacaaaatattgtgcattagatgcctcatatacttctccagcacgtttgattatctcctcagtacctaacatacctgttttaatagcatcaggtccgattgataaagccgtttcaagttgtttttcaaatacatccattggtaatggtgtaacatcgtgtgaccatgtatctttatccatagtaacgatggcagttaaagcgaccatgccatacgtatctaattcttggaacgttttcaaatctgcttgcatacctgcgccagcacttgtgtcagaaccggcaattgttaaaactttctttaaagccattgagcttcactcctacataataatattgtattcatcatatcatttttaacctaattgaaaaatattaagcattcaatatttgatgattgttgaaatgaatcattcatactattgtaacttttgaaaatgtcattcactttagataagtgtgatatgttaaaatatgtcctgaggtgagattgaatggaatggtcgcaaatttttcatgacataacaacgaaacatgactttaaagctatgcatgattttttagaaaaagaatattcgactgcaatcgtataccctgatagggaaaatatatatcaagcgtttgatttaacaccgtttgaaaatatcaaagttgttatattaggacaagacccgtatcatggtccaaaccaagcacatggattagcattttcagtgcaacctaacgcaaaattccctccatctttacgtaatatgtataaagaattagcagatgatattggatgtgttagacaaacaccgcatttacaagattgggcaagagaaggcgtcttgttattgaatacagttttaaccgtaagacagggtgaagcaaattctcatcgtgatattggttgggaaacatttactgatgaaattattaaagcagtgtctgattataaagaacatgttgtctttattttgtgggggaaacctgcacagcaaaaaataaagcttatcgatacatctaaacattgtattataaaatcagtgcatcctagtccactgtctgcatatagaggattctttggatcaaaaccgtattccaaagcgaatgcctatttagagtcagtaggaaaatcaccaattaattggtgtgaaagtgaggcgtagatggtgaatagagaaactttaatagcacgaattgagcaagaattagtacaagcagagcaggcacagcatgaccatgactttgaaaaacatatgtatgccatacatatattaacatctttatatgcttcaacatcaaatacaccacatattggtgaacaacaaatgaatcgtcgtattgctaaccataatcaaatgccacaatcacaaataacgcagccaactcatcaagtgacagctgctgaaattgaagcgatgggtggtaaagtaaatacgcattcagcacatcatcataataagtcatattcacaaccttcaaaccaacaacaaagattagcgacagatgatgacattggcaatggtgaatccatatttgatttttaaaaagcaacaatgaaacataattacttaatagcttgttaagtatgttggttaataatcaagacgcatatacttttattcgagtgttcggatttaaacatttattaatactgaattatataaggagaggtagcaatgaaattatttattattttaggtgcattaaacgcgatgatggctgtcggaacaggtgcatttggtgcacatggtttacaaggaaaaataagtgatcactatttatcagtatgggaaaaagcaacgacgtatcaaatgtaccatggcttagcattattaattataggtgtaattagtggtacaacttcaatcaatgttaactgggctggctggttaatatttgctggtattattttctttagtggatcattatatattttagtattaactcaaattaaagttttaggtgcgattacgccaattggtggcgtattgttcatcattggatggataatgttaatcattgcgacattcaaatttgctggttaaattttaaaactttagattacctatgtaactaaacattaaatttttaataaaaataatcaagaaaaagagttacaaactcatcttttgggtatagaataccttcgaggtgagtttttatttatggaaaaaaagaataagcaaatagatagaggcgatttaaaacaaaacctatctgaaaagtttgtatgggcgattgcatatggttcatgtatcggatggggcgcattcatcttaccaggagactggattaagcagtcaggtccgattgcagcatcaattggtatagttattggtgcattattaatgatattaattgcggttagttatggcgcattagtagagagatttccagtatcagggggcgcgtttgcctttagtttcttaagtttcggcagatatgtgagtttcttctcatcatggtttttaacttttggttatgtctgtgtcgttgctttaaatgcgaccgcattcagtttactagttaaattcttattgccagatgtcttaaataatgggaaactatacaccattgcgggctgggacgtttatattacggaaatcattattgcgaccgtattactacttgtattcatgctagtaacgattcgtggcgcaagtgtatctggatcattacaatattatttctgtgtggcgatggtaatcgtcgtattattgatgttctttggttcattctttggtaataattttgcacttgaaaatttacaaccgttagctgaacctagcaaaggatggttagtgtctattgtggttattgtatccgtggcaccatgggcatatgttggatttgataatattccacaaacagcagaagagtttaactttgcaccaaacaagacatttaagcttatcgtgtacagtttattagcagcatcattaacttatgttgtcatgattttatacactggttggttatcaacaagtcatcaaagtttaaatgggcagttgtggttaacaggtgctgttacacaaacagcatttggttatattggattaggtgtattagcaattgcaattatgatgggtatatttactggtttaaatggattcttgatgagttcaagtcgcttgttattttctatgggacgttcaggtattatgccaacaatgtttagtaaattacatagtaaatacaaaacaccatatgtcgcaatcatattcctagtaggtgtgtcgttaattgcaccttggctaggaagaactgcattgacttggattgtagatatgtcatctacaggtgtatccattgcctactttattacatgtttgtctgcagcgaaattattcagttataacaaacaaagtaatacgtatgcaccggtttacaaaacgtttgctattatcggctcatttgtatcattcattttcttagcgttgttattagtgccaggttctcctgcagcactgactgcaccgtcttatattgcattacttggatggttaatcatcggtttaatattctttgtgattcgatatcctaaattgaaaaatatggataatgatgaattaagtcgcttgattttaaatagaagtgaaaatgaagttgatgatatgattgaagaacctgaaaaagaaaaaactaaataataaaagaatcgcacaatataccttcttcattcggaggcgtatcgtgcgattttttgtattataaattgacatttaagacgaggcagctgaaccttatatataattgctaatagtttgggctgagccaattctaacaatatttataatcgtttaaaagatttcacgaacccagaaacaattaatttagaaatttggtcggcgaataataaacctaatgcgatggctcctgcaataagtgttacttctaacattgtatttattgctgtgctgaaatttaataagactaaattttttgtagcatcgtatgctaagccaccaggtactaatggaatgatacccgttaccataaaaatgatggcaggttctttttgtttacgagccatataatgacttaacaagcctaatgctaaactaccaaagaaactagagtatatagtgtgcacattaaagccgttgaagaataaggtgtaaaccatccatccacatgtaccaacgaaaccacatgatagatataattttctaggtgcatcaaaaatgacgcagaagaacattgaagctaaaaagctaaagataaagtttaagatccaaaacatagtctgatactcctatactaaaattaatacgctaccaacgccagcaccgatgccaaacgcagtaaccaatgcttctaatgatttcgttgtgaacatcaacatgtgtccaccaaataaatcttgtattgcgtttgttattaatacaccaggaacaataggcatgactgccgcaatgataatagttgccaagtcacctgttgggataagtgtatgtccaataacggcgataatcccaataactaatgaaccaatgaattctgggataaactgtgcatgtaacttgcgatctaaaatctcagtgactaggtatcctagactacctgctaatatcgcagttaaaacatcaatcaatctaccaccttgtaaatataagaaactcattgcaatcattgctgcagcaaaacctttaaagggaagactgctgtcacgcttagcaacatatattttttcaagttgcgtttttgcttcggctaaagaaatttcattgtttgtaatttgacgcgaaattttattagcttgagaaatttttattaagtttgtatctcgagaggtaattctaaatattctaggaaacgattccgaatgtaacgtaaactggatgacagtgtttgtaacaaagctgttactttcactgtaaccaagtttttttgcaatacgtgtcatggtatcttctacacgcgtaccttctgcaccagattctaatagtatgcgagcagcaagcatgacaacgtctttgataagtacctcttgtttgtattcttctgaatttatgtccatttcatcaccattgtttataagaatttaatactcattatagtttatacactataaaataaccacatgagctttttgataagttgttattgattttaaaaaactaatatttgatactattgtaataataatcatcggaatttttagtagttaaaattctcttgaagtataaaaaggaaaaattattgaaaaaaattcgacaaaaatatgtttcaaatatttcaaataggttaaaataatattagttaaccattacaaaaattgtatagagtagcgactgtataatttctattgaggttaacgtttatatgtagtgatagtagttaaagttctcccaaggaagactactcgggtacactttgctatgagcaaagtgtactttgttattgataatacattagcacatatatataagtttaaacatacagatttcaactatttaccaaatcacgtcttatgtatacgggaatatactgaagataaacgaaaaattccaagcttaaaccgataagcttggaatttttttattaatttataaacgtaccaatgtattaagaaatcgcaaagaattgatcgaattcgtttgtgttaataagatgtcctacaaagaaactaccgaattcaccgtatcgtgctgttgtttcatcaaagcgcatttcgtatacaatttttttgaattgtaatacgtcatctgagaacaatgttacgccccattcgaaatcatcaaaccctacagaaccagtaataaattgtttgattttgccagcatattttctaccaatcataccatggtcatacattaatttttggcgttcttccatagttaacatgtaccagttataagtttcattacgacgtttgttcattggatagaaacaaatataatcagaatgtggtaattctgggtataatcttgctttgatatgagggttctcataaggatcttcatcagatttaccagctaaataattgctcaattcaatgactgatacatatgaatatgtagggattaagaagtcagcaatgcgcaatttgttaaattcattttcaatatgatttaaagacttcatttcaggacgtaagaaccataataacaaatctgctttttgaccagttatattataaatagcttgatcaccagattttgatgatcttacagttgctgtattttctaaaaatgattgaaattcagtgacaagtgcatcgcgttcgtcctttggaactagacgtaatgatgcccaattaactgcataaaataaatgtagactataccaaccatctaatgtttcggctgcttgactcatgtttatcgctccttttcaaaaatcatcagttctttataaattttatcataaagcaaaggggtaacgataaaattatgattacaaattggtgacgtggcattatgaaataaaatggcgtataattataccgtgaatgattaataagatttatattacaggaggacattatggctgatttattaaatgtattaaaagacaaactttctggtaaaaacgttaaaatcgtattacctgaaggagaggacgaacgtgttctaacagctgcaacacaattacaagcaacagattatgttacaccaatcgtgttaggtgatgagactaaggttcaatctttagcgcaaaaacttgatcttgatatttctaatattgaattaattaatcctgcgacaagtgaattgaaagctgaattagttcaatcatttgttgaacgacgtaaaggtaaagcgactgaagaacaagcacaagaattattaaacaatgtgaactacttcggtacaatgcttgtttatgctggtaaagcagatggtttagttagtggtgcagcacattcaacaggcgacactgtgcgtccagctttacaaatcatcaaaacgaaaccaggtgtatcaagaacatcaggtatcttctttatgattaaaggtgatgaacaatacatctttggtgattgtgcaatcaatccagaacttgattcacaaggacttgcagaaattgcagtagaaagtgcaaaatcagcattaagctttggcatggatccaaaagttgcaatgttaagcttttcaacaaaagggtctgctaaatcagacgacgtgacaaaagttcaagaagctgtcaaattagcacaacaaaaagctgaagaagaaaaattagaagcaatcattgatggcgaattccaatttgatgctgcgattgtaccaggtgttgctgagaaaaaagcgccaggtgctaaattacaaggtgatgcaaatgtctttgtattcccaagtttagaagctggtaatattggttacaaaattgcacaacgtttaggtggatatgatgcagttggtccagtattacaaggtttaaattctccagtaaatgacttatcacgtggctgctcaattgaagatgtatacaatctttcaattattacagcagcgcaagccttacaataacgatggatttagcgagtaaatattttaatggcgtcaactggcgatatatcgatcattcttctggattagaacctatgcaatctttcgcattcgatgatacattttgcgaaagtgtgggcaaagatatatcagataatgttgtgcgtacttggattcatcaacatactgttattcttggtattcatgattcaagattgccgtttttaaaagatggcattgattatttaacgaatgagattggttataatgccattgttagaaattctggtggcttaggtgtcgttctagatcaaggtgtattaaatatatcgctgatgttcaaaggacaaacagaaacaacgattgatgaagcgtttactgtgatgtacctcttaattagcaaaatgttcgaagatgagaatgttgatattgatacgatggaaattgaacattcttattgcccaggaaaatttgacttaagtatcgatggtaagaaatttgcaggcatatcgcaacgaagagttagaggcggtattgctgtacaaatttatctttgtgttgaaggctctggttcagaacgtgcattgatgatgcaaacattttatgaacatgctttaaaaggtgaagtgactaaatttaaatatcctgaaattgaaccatcttgtatggcctcattagagacattgcttaacaaaacgattactgttcaagatgtaatgtttttactattatatgcaatcaaagatcttggcggtgtattaaatatgacgcccattactcaagaagaatggcaaagatacgatacgtattttgataaaatgattgaaagaaacaagaaaatgatagaccaaatgcaatagttaaatatttaacagcccctttcaagttatcgtttggggctgttatttttgaaagtatccataaaaagcataaatatgttattgacctaatatttaaattgaacatcattaaattaaaagtaatgatatgatggaaataataaatttaataagaaaatttcatgttttacgtattaaatagattgagaatagggtatatataatgcgtatgactatgaaagaaacgaaccttctattgaaatgttctaatactttagtagtaaatctatatattccaattattattggttctccaccaaatgtggtgggtatataatttaaagaactatttttaaaatacaacttttagagtttttattattaggcggccagtccattattgggcttggttgtcttctttttttctcctttgtacaagctgaaaatcatcattatacgtgctttaaagttattgaaatttctgtaaccaaaagaaattcgcttgattaattttatcttattattaattccttctatagcaccattattaaatgctgggtaataaattgtatttcttaacatcctttgatgttttctataatatttaaccactttccatacacccttactcacagactttttactaactgaatttaaacgattaataaatttaggccaattacataaccttaggtcttttcgtaatccttggacaagttcgtaggagtgtcgtagtatatcgtcttttgaaagcatgaattctacaatgtcagatgagcgtttataagccttaaaagatttattccatctgtatttactaaatatggttttactagtatccatcaatagaactttccagttattcttaaaaattgtataattaggtccttttttattacggtattcattcataacttgtacacgatacttattaagttctctatttaaatgttgaacgatatggaatctgtcaaaaataatagctgcattaggaaataggtcgcgaaataatcggacatagggttcatacatgtcaatagtaaccgtcttaacttgttgtcgattttttaaatcgaatcgctcgaaataggcacgcaagaatcttgtagttctattttctaaaatatctataacatcatgagtatcattatctataaaaatgaaactcattgatccagttacatttttaacgcttttaaattcatccatagcgatgtgttctggcaaacaattaaagggtttaattcgtaatgaattagccgctttagttctaatacgacttacagtagatggagagatacagttatcttctgcagtatcaatctctgttttaactttagtagcttcttctataactttttgagtaacacatcttgagataaaacacgactcatcaacaattgacgttttagcagtaaaagtgccattgcattctaagcatttaaaacgttgtttagctaagttgaggtatgtgttatacccttgagttttaagtaaagtaatacgagaaacacgcttaccatgtttatgaatttgtccttcatttttaactccacaacaataacaggccgaaggcttatacgttagtacagcattaaccactgttgctttttttcctttgataatgacgtcaatttcttggtttatatattttatattttcatcttttattcttagtaattctaaggtatcattacacataggcgcacttgtctcctttagtttgggtttggtcactttaaattatagaggcaattgcgctttttgtgtattaaaaaaagcaggaagttttaccttcccaccataaaagatgaagaaccttattatttgtagtattatagttagggtggaaaattataaattgtagggctattttataaaaagataaagaatctgaaatatcactcgataagatttaaactttgaagtaaacgaaagttagttttatactaatcaagttaagtcaaatataaattcaaaataaagattatacataatatgaataatgtgagataaagactgcaatgaaatttgacgcgaatgcgtatgcaacttagaatatgatgtcttttactaataaataaaaataatgaatcaagtataggataaatataaaaggtgatattgacatgacaagaaaaggatatggggaatcgacaggtaagattattttaataggagagcatgctgttacatttggagagcctgctattgcagtaccgtttaacgcaggtaaaatcaaagttttaatagaagccttagagagcgggaactattcgtctattaaaagcgatgtttacgatggtatgttatatgatgcgcctgaccatcttaagtctttggtgaaccgttttgtagaattaaataatattacagagccgctagcagtaacgatccaaacgaatttaccaccatcacgtggattaggatcgagtgcagctgtcgcggttgcttttgttcgtgcaagttatgattttttagggaaatcattaacgaaagaagaactcattgaaaaggctaattgggcagagcaaattgcacatggtaaaccaagtggtattgatacgcaaacgattgtatcaggcaaaccagtttggttccaaaaaggtcatgctgaaacattgaaaacgttaagtttagacggctatatggttgttatagatactggtgtgaaaggttcaacaagacaagcagtagaagatgttcataaactttgtgaggaccctcagtacatgtcacatgtaaaacatatcggtaagttagttttacgtgcgagtgatgtgattgaacatcataactttgaagccttagcggatatttttaatgaatgtcatgcggatttaaaggcgttgacagttagtcatgataaaatagaacaattaatgaaaattggtaaagaaaatggtgcgattgctggaaaacttactggtgctggtcgtggcggaagtatgttattgcttgccaaagatttaccaacagcgaaaaatattgtaaaagctgtagaaaaagctggtgcagcacatacttggattgagaatttaggaggttaatgcgttgattaaaagtggcaaagcacgtgcacatacgaatattgcacttataaaatattggggtaaaaaagatgaagcactaatcattccaatgaataatagcatatctgttacattagaaaaattttacactgaaacgaaagtcacttttaacgaccagttaacacaggatcaattttggttgaatggtgaaaaggttagtggcaaagaattagagaaaatttcaaaatatatggatattgtcagaaatagagctggcatcgattggtatgcagaaattgaaagcgacaattttgtaccaacagcagcagggttggcttcatcagcaagcgcatatgcagctttagcagcagcttgtaatcaagcactagacttgcagctgtcagataaggatttatcgagattggcgcgaattggttcgggttctgcatcgcgtagtatttatggtggatttgcagaatgggaaaaagggtataatgatgagacgtcatatgccgttccacttgaatcgaatcattttgaagatgaccttgccatgatatttgttgtgattaatcaacattctaaaaaggtacctagtcgatatggtatgtcgttgacacgaaacacatcaaggttttatcaatattggttagatcatattgatgaagatttaactgaagcaaaagcagcgattcaagacaaagattttaaacgccttggtgaagtaattgaagaaaatggtttgcgtatgcatgccacgaatctaggatcaacaccgccgttcacatatcttgtgcaagaaagttatgatgtcatggcgcttgttcacgaatgccgagaagcggggtatccgtgttattttacaatggatgcgggacctaatgtgaaaatacttgtagaaaagaaaaacaagcaacagattatagataaattattaacacagtttgataataaccaaattattgatagtgacattattgccacaggaattgaaataattgagtaaggaagagataaaatgattcaggtcaaagcacccggaaaactttatattgctggagaatatgctgtaacagaaccaggatataaatctgtacttattgcgttagatcgttttgtaactgctactattgaagaagcagaccaatataaaggtaccattcattcaaaagcattacatcataacccagttacatttagtagagatgaagatagtattgtcatttcagatccacatgcagcaaaacaattaaattatgtggtcacagctattgaaatatttgaacaatacgcgaaaagttgcgatatagcgatgaagcattttcatctgactattgatagtaatttagatgattcaaatggtcataaatatggattaggttcaagtgcagcagtacttgtgtcagttataaaagtattaaatgaattttatgatatgaagttatctaatttatacatttataaactagcagtgattgcaaatatgaagttacaaagtttaagttcatgcggagatattgctgtgagtgtatatagtggatggctagcgtatagtacttttgatcatgaatgggttaagcatcaaattgaagatactacggttgaagaagttttaatcaaaaactggcctggattgcacatcgaaccattacaagcacctgaaaatatggaagtacttatcggttggactggctcaccggcgtcatcaccacactttgttagcgaagtgaaacgtttgaaatcagatccttcattttacggtgacttcttagaagattcacatcgttgtgttgaaaaacttattcatgcttttaaaacaaataacattaaaggtgtgcaaaagatggtgcgtcagaatcgtacaattattcaacgtatggataaagaagctacagttgatatagaaactgaaaagctaaaatatttgtgtgatattgctgaaaagtatcacggcgcatctaaaacatcaggcgctggtggtggagactgtggtattacaattatcaataaagatgtagataaagaaaaaatttatgatgaatggacaaaacatggtattaaaccattaaaatttaatatttatcatgggcaataaatgatttgataggggagcaatcatctaatttaattagaagataaatgctccattttttattgtcagccgtgttacgtatcttgaaaaaaatattaaaaagagtaaaatagatagagttaacgaaaaaattaatgaaatcgacgatatagatatgataaagaaaggtgggtagcaatatgaaaaatacattccttatttgtgatgaatgtcaggcagtcaatataagaacgttacaaaagaagttggaaaaattagatcccgatgctgaaatcgtgataggttgtcaatcttattgtggacctggacgccgaaaaacattcacttttgttaataaccgcccactggctgcgcttactgaagaagaattaatcgaaaaagtttctcaacaattaaagaaaccacgtgatcctgaagaagaagagcgtttaagaaaacgacatgaagaacgtaaacgtcgtaaagaagaacaagatagaaagcttaaagaaaaattagaaaagcgaaaagcacaacaataaaacctgatggcagcatcattcaatgcgtgccaccaggtttttatgttttgtctagaaattaaataaatcattaaatgattcggccatcgtaggatgcgtataaatattatctcgtaatacggtatatggaatgttttgatcaatcgcaagtttaattatattaattaattcttcagattgcttaccatataatgtagcacctaaaatcatattattttcattattaatgactactttaaataaacctcttggatcattgttaattttgtgacgaggtatagcacttactaaaagttgatgttcagtgtaatcataatgttgagcggcagcttctttaccagttaatccaacacgtgataatggtggatctataaatactgtataaggcacgctgcctctattgtcagtcgtacgtgactgattaccatataacgctgatttgataattcgataatcatctaaagatatatacgtaaattgaagtccgcctttaacatcacctgcagcataaatatgcggcacagttgtttgaagatgagcattgactttaatttcgcctctgtcgcctaattcgatatcagtattttctaaagctaaatccgtattcggtttgcgaccgatagccaaaagtactgcatcagcctcaaagttaccaacgttagtatggactgttgtatgatgattgtcagatgacaattcagtcgtttcaacatttgtatacaatgcaatgcctttattttctaagtcagtaatagcatgtgcaacgacatcttgatcttcacgtggcataaatgattcaccacgttctaatactgtaaccttactacctaaattcgcaaacattgaagcaaattctaaggcgatataaccgccacctacaataacgaggtgcttaggttgatagttaatgtttaataaacctgttgaatcgaagacgtgtttagcttgatcaaggcctttaatgttaggaatgacagaggtagcaccagtattaataatgatatgaggtgcagtaatactatcggcgatatcgtcatgctgatctaataaattcacttcagtattagatttaaactgcgctttaaaatccagtacatcaatgttgttatcgtctgctaataaatggtaatttttattgtttagcgcattgacaacatcgtttttacggttataacttgcttcaaaagatttgccttctaatccatcatgtacaagtgtctttgaagcaatacatcctatgtttatacaagtgcctccatacattttcggagattgttcgataactgcgacgtgttgacctgttgatgcagcatatttggctaaagttttaccagctttcccaaatcctattacaattaaatcatatgttttcatgacataaatcctccttttgaatgtcttcaatgacatctttgattgtttttccattataaaaattaataatgatattctgttcgtcttgctgataatgtgacatggtagttgcaatattacgagcaatttgacagtgactgccttcgtcgccagtaaatagacgtgtgtggtgttctttctctaagacaaaatgtttatataatgttgctagagagacatcagcactttgatcatttgctaaataaccgccatctttacctcgtattgtgtcaatcatttttaaatcgacaagttgagtcgtcacgcgtcgtaattgaacaggatttaaacaagttaattctgctaatgaactactattgaatttttctgaatgatgcttagttaaaaaagctaatacatgcacggcaatgttaaattctaaattcaatgtttctcacctcataattgtaactgtattagttacaattaaaaatcattttgctcaatgtgtcaatacttatgtttgaaaagtgttgaattaggtgtggttattgtgatgatttattgtttgaaagttgatgcattaacggtgagattgcacaattgaaattttaattatgtatgaactgatagatatgaaatgaatattgaaaatgagagcaataaaattttgaatgatgatgttgtgtgattgtataaacttattcgtattttagatacgttttgatatttcgcatgatgaggaaatacttttaacaactgatgacatattttaatagtgaatatattttgagatattaatatatttaatgttaaggatgttgtcgcaataaaattaaaatattgaaagataatttttattgattaattgcgaatatacaaagacaccattatatccatatgctaaaataagaaaaaaggcgacatgttatctcaatttacctgcatctagactcctttacataagaaataatcatcgccgagttttaaaattttacaactttgtagatgtaaaaagcatttgattttaaatagtttgaaaatcatatatttttgaaaaaggagcatgccgatgagtattgacatgtatttagacagatctcgaaaccaagcttcaagtgtggggaatttgagtcaaacaatgaattcaaattatgatgcgttggaaaaagcaattactcaatttatcaatgatgatgcgcttaaagggaaagcgtatacgtcagctaagcaattttttagtacggtgttaattccattatcaacaagtatgaaaacattgagtgatttaacgaagcaagcttgcgataattttgtgtcacgttatacgagtgaggttgatagcatatctttaaaagaatcagagcttgaagaagatatcagatcattaagtcaacaaattacgcgatatgaaaatttgaataacaatttgaaaaagcatgcttccgataatcagcaagccatttcatcgaaccaacaaataatacgaacattaggtcaacaaaaacatgaattagaagagaagctacgcaaattgcgtgagtttaatcaaaaatcaccagaaatatttaaagaagttgaagaatttcaaaaaattgtccaacaaggacttacccaagcgcagaatttttggaacttttcaacaaatcaatttaatataccttcaggtaaagaacttgattgggctaaagcaagtcatgaaaaatatttgaaagttgctatggggaaaattgaacataaagcagagaaagaaactttaaataaagcagactttgctgttataaaggcatatgccaaagagcatccagaagacgatatcccgaaaagtataatgaaatatataaatgacaataaagacagtattaaaagagatataggattagatatcacttcaacacttttagagcaaggcggtataaatgcaagtaaattcggtgtatttatcaatacagcaggtggagtgaaaggcccagcaggtccaaattcatttgtggaagtcaaacgtacatcaggtaatgtgtttatagaaaatggtagtaaatttgcaaaaggcggaaaatacctaggtaaaggtgttgctggtgtaggatttggtataggtatgtatgatgaccttgcaaatgatgataaaacatttggagaggcgttgtcgcacaatggtatgacgcttgcagctggatctgttgcagcatttggtgtagcggctttagtaagtaatccagtcggttgggctgtggtaggtattttaacagcaggtattattggatatattgtttctgattatctttatcaaaataattattttggcataaaagataaagtggactgggcaggacataaaatagacgagggtattgatgctgtaaacaaaactgcagaaaaagctgtagatagtgttggtaatgccattggtgatgccacaaaaagtattagtaatcatattaatcctatgaaatggagttggtaaatattgctttgcgaatctaaagttattaataaaaatcctaaatatcgaataatcaaatacgaaagtgaatacttaatgattgatttagcaagtaattggattgttttcttctttccatttattaactggctcataccgaaaacatatgtcaaaatcactaagaatgattatgaaaaattaaatattgtcaaaccagttaaaaataaatcgataggatggactatattcgcgggtattgtgttacttggtggtactgtaagaagaaatacttatttatttgattttcaattagaaaaactaattgtttggagcagctgttttattggttttttaggggttatatttttttattgttatctaaataagaaattaacattaaatgtttataaggaaaataaaaataatgaacttaaattaagattattaccctcctttaaaaatatgtgtttcacaattttttattacctctttactggtttcatgtcttatggggcattttacttgttggtgtttgaaaatgtacaaaatttaatcttatatatttcttggcttttcatgactatgctatttatgttaatgaatatgcactcaattatagataaaaaagtacatatatttttaaagtctaataaatagttacaaatttagttggttttcaattgctaattagggggtgtaaacattgctgtgcgaatctaaaatcatcaataaaaacccaaaatatagaattattaaatataatgatgagtacttaatgatcgatataataagcacttggattagtttattttttccttttattaattggttcatccccaaaagatacgtcaaaattagtagagaagagtttgaaaatttaaatattgttaaacctgctaaaaagaatgttttttggccagttgctagtatctctactttattcgcagttacattaagaaagtatacgcttttacttgacactcaacttgataaaaaattagttattgccatatgttgcatcacatttatagggattttaatattttatgtacgcctaattaaaaaatcatctttaaatatttataatactaaaaataaaaggtcgaaaatcatcttaataccaacactaaaaaatttttgtttcacattgttcggatatgtttttttaattttttggacagtgattttctcatatgctctattatcaatgagttatcaaaacataatagtatattttgcttggattacagcaataataggtttttttctagtgaatatagctttaattatagataaaaacattcatgtcatacttaaaaattaaatggtggtaataaattcagattaaagatatgcaaataacaatgaataaaatttttaatgatagtaagttgataatattttaatgtcttttgaagtatcgaaaaatgtattacacataaaattaaagggatgtggagacattggtttgcgaggtaatagctatatacaaaaatcccaaatatagaattattaaatataatgatgaatatttgatggtgaatataataaataattggttagttttattcattccattgcttaattggttgacaccaaaaagatacatcaagatcagtcaagaagaattagaaagtttaaatactttcaaacctgctaaaaacaatgcattttggccagcattaggtagttcagttttatttagtgtgacttttagaaagtatatgcctttatttaatgttagattggaaaaaacaatagtaatagccatattttttgttgtatttcttggtattttatttttctacctaaatttaaatcgtaggctagcattaagtgtttttactatgaataaagaaaaaagtcagaaaatgatattactacctaatttaaaacattttttctttataatatttgcatatttatatttcggtggtttttcatttttcactttatatgccctgataactatagatgttcaaaatataattatatttatctgttggggtgcagtaactatgtttttcttttttataaacattgttcccattggcattaaaaaagctcatgtaatacttcttaaaaaagctgaataataaatgagttttttaaatctaaaattattaaatttaatataaaaatttgactcatagatagaatgaataaaaatccgaaatatagaattatcaactacaaagatgaatattttataatggatatcccatgttaatattaacagttttaatttctttgttatgcaaatcaaaacattatagtatttctaattaaatttgcaatggctttaatattgtcgttcttaaatgtttttcaatttctgattcaaaagtacatgtaatttaaaggtcaacgagcaatcgcgctatatgcatatcaacttaagcaatacttattttaactgagttctacataacatttttctaatacaccgccttaattcaaaccctaattctaacatttggaagttgtattaaatcatgatagtgtgatagtggaaaagttataaagataaggagctgggtctaatgaagcaatttgtaaacttaggtaaatctgatgttgaagtgtttccaatcgcacttgggacgaacgcagtaggtgggcataatttatatccgaacttagatgaagaacaaggaaaagatgttgttcgtcaagccattaatcatggtattaatttattagatacggcatatatttatgggccagaacgatcagaagaattggttggagaagttgttaaggaatatccgcgagagcaaattaaaattgctacgaaagggtctcatgaatttgatgaaaatcaagaagtacatcagaacaatcaaccggaatatttaaaacaacaagttgagaatagtttgaaacgtctacaaactgattatatcgatttatattatattcattttcctgatgacaacactccgaaagatcaagcagttgcagcattacaagagcttaaggaacaagggaagattaaagccattggtgtatcaaatttcacattagatcaacttaaagaagcaaataaagatggttacgttgatgttgtacagttagaatataatttattgcaccgcgaaaatgaggcagtattgcaatattgtgttgatcaccaaatcacatttattccttatttcccattagcatccggtattttagctggaaaatatgatgagaacactaaatttagtgaccatcgtactacacgtcgtgattttatacctggtgtttttgaagagaatgtgcgtcgcgtaaaagctttggaaagcctagctgcagcacatcaaacttcaattgcgaacattgtattagcattttatttaacgagaccagctatcgatgtgattattcctggtgcaaaacgtgcagaacaagtcgttgaaaatattaaagctgcagatatcgttttatcagatgatgagattcaatatatcgatgaattgtttccaattgaagactaaatgaattgtatttaatggtgatatcaggctgggacataaatcaatgttctatgctctacgaagttatattggcagtagttgactgaacgaaaatgcgcttgtaacaagcttttttcaatcctagtcaggggctccaacacagagaatttcgaaaagaaattctacaggcaatgcaagttggggtgtgggccccaacacagaagctgacgaaaagtcagcttacaataatgtgcaagttggggtgggacgacgaaataaatttttcgaaaatatcatttctgtcccactcccatcacaaacgacgttatataaggcatgacgaaatttcgtcaaatttatataaaagttgtaagcgttttactattcggtaggcaaagcttatgatagtataattaggtaacgaaaaacacagatatttattaatcaaaagtgaggttaggctaaaatgattactgttttgtttggtgggagtagaccaaacggtaatactgcacaattaacaaaattcgctttgcaagatttagagtatcaatggattgacgtgacacaacatcagtttaaaccgatacgtgacgtgagacatacagcagagactattacttcatatgacgatgactatttgccgattctagataaaatattggctagtgatacaattatttttgcatcaccagtgtattggtatagcatttcagcaccattgaaagcatttatcgaacattggtcagaaacattacaagataaacgatatcctaattttaaggcacaaatggccgaaaaggattttagagttattttagttggtggagattgtccaaaaataaaagcgaagccagcaattacgcaaatgaaatatagtttagactttttaggtgccactttaaatggttatattattggaactgctgaaaagcctggtgacatcatgaaagacaactatgccttagcacgtgcaactgagtggaatagtatattgcaataagacatacctcatactaaacgaagtgattttttgcttcgttatttttatttttaattttaacggaaaatataaatatataaattgaatagacaatcattgtttattaagtattgagcaagttgtggtataatgccgttattaaaacttgttaataaggggagaaagtcatgttcaaggtaagacaagcaactgaaaaagatgttgttcaaattagagatgtcgcaactaaagcttggtttaatacatacttaaatatatacgctgcgacaacagttaatcacttgttagaagcttcatataatgaacatcatttaaagaaaagacttcaagaacaattattcttagtcgttgaagaaggtaatgacatcgttggctttgctaactttatttacggtgaagaattatatttatcagctcattatgttaaaccagaatcgcaacatacaggttatggtacagcattgttaaatgaaggattatcacgttttgaagataaatttgaaggtgtttacttagaagtagataataaaaatgaagaagcagtagcttactatatagagcaaggttttacaatcttacgctcttatcagccagaaatgtatggcgaaaagttagacttagcacttatgtacaaagcattttaagtaaattaaatattatattaaacgaaaaggaggggaataatgactaacgcatatgtagatttaaaattagtagaagaaaaagtttttaaagatccgatacatcgatatattcatgttgaagatcaattgatatgggatttaattaaaactaaggaattccaaaggttacgtcgaattagacaactaggaacactgtacctatcttttcacacagcagaacatagtcgctttggacattctttaggtgtgtatgaaatagttagacgattaattgatgagtcatttattggtcatgatgcatgggacaataaagatagaccgttggcattatgtgctgcattattacatgatttaggacatggtccattttcacatagttttgaaaaaatatttaatacagaccatgaagcatacacacaagtgattattactggagatactgaggtgaatgctgtattacgtaaagtgtcgcctgagtttccaagagaagttgcggaagtaattaataaaacgcatcataataaattggtcatttcgatgatttcgtcacaaatcgatgcggatagaatggattatttacaacgtgatgcgtatttcacaggtgtatcatatggtgcttttgatatggagcgtattttaagattaatgcgaccttctaaagatgaagtactaatcaaagaaagtggtatgcatgcagttgaaaactttattatgagtcgttatcaaatgtattggcaaatttacttccacccagttagtcgtggtggagaagtgctgcttaataattgtttgaaacgcgcaaaacagctttataatgaaggctatgaatttaagttgcatccacatgattttattccattttttgaagagacagttacgattgaacaatatgttgaactcgatgaagcggtagttacgtattatttggaaaaatggacaaaagaagatgatgccattttaagtgatttagcaagtcgatttattaatcgagacttatttaaatatattccatttgatggctcaattattacaatatcagaactgcaagaactgtttgaaacaggtggtattaatccagattattattttgtaagtgaagcattttcggatttgccatatgactatgatcgacctgggtcaaatcgcaaaccgattcatttattaagacaagatggtacgattagagaaataagcaatcaatctttagtcattcatagtattacaggtattaatcgccaagactataaattatattatcctagagaaatggttgcaaagattaaagataagacaattagagaagctattgaaaatttgattaatgagcttaattaaacagggctaaaattgttatcgttaaatatggaggttatatcattgtctgagaaaaaaggctttaattttaatatcataaaaaatgaccctctagatggtcataaaggtacaaatattggttcaattagcttagacaatattgcaccagtttttatcgatgttgctaacaaagaagcatttattgatattggaggcatgcatgctcgcgccaaagttgaaaaaggcgtgaaatggattactgataaagctgctgttgaaggcgatgaagctaaagaatattggttgtgttgggtaacaacagaacgtaatgaacaaggaccatattatgctggtttaacagcgtgctatttattagtgaataaagcaattcgtcgtggttataaaagtatgcctgaacatgttaatatgatggataaatcaatgaaacatcatattatcattgatcaaattggtgacgagaataaagctattttaaaagactttttaatgaaccatgatgaaggtatgtggaagctttcttctgatgctttacatcaagcatttaattaaatattagaaactaaaatttcccaattaatctataaagatatgattcatttctcaatgacgacgtaaatcttgaggtgaaaataaagtcttagattggttgggagtttttttaatttttttgaaattaaattaatctgtagttaataaaaaatttgaataactgacacatttttttgatcatagctatatactttgtgaattaattcacattataataagagtgaagataagagtattataaattatctttaaataaatatatgtgaagtaaaaattacacgttagcatatcgattatgtcatttcttttaacatattaactagggaaacgttaaaagttaacggttgatatctaactaaaaacaaagtcacagtagtatgttttaatctggcgtctattacaaataaaaattacatctataattattcgttttcatttttgaaagtaatcgccaattaatatcatacatactggagtgactataaggaggacattattatgagagcagcagttgtaacgaaagatcacaaagtaagtattgaggacaaaaaattaagagctttaaaacctggtgaagcgttggtacaaacggaatattgtggcgtttgtcataccgatttacatgttaagaatgctgattttggtgatgttacaggcgttactttaggtcatgaaggtattggtaaagtcatcgaagttgcggaagatgtagaatcattaaaaattggagaccgtgtgtctatcgcttggatgttcgaaagctgtggaagatgtgaatattgtacaacaggtcgtgaaacactttgccgtagtgtgaaaaatgctggttatacagtagatggtgcaatggctgaacaagttattgttactgcagactatgctgtgaaagtacctgaaaaattagatccagcagcagcgtcttctattacatgcgcaggtgtgacaacttataaagctgtaaaagtaagtaatgtaaaacctggacaatggttaggtgtttttggtataggtggtttaggtaacctagctttacaatatgctaaaaacgttatgggggctaaaattgttgccttcgacatcaatgatgataaattagcattcgcgaaagaattaggtgctgatgctattattaattctaaagatgttgatccagttgcagaagttatgaaattaactgataacaaaggattagatgcaacagtggtaacttcagttgctaagacgccatttaaccaagcggttgatgttgtaaaagctggtgcaagagttgttgccgttggtttacctgttgataaaatgaacttagatatcccaagattagtgcttgacggtattgaagtagtaggttcacttgttggtacaagacaagacttacgtgaagcgtttgaatttgctgctgaaaataaagtaacacctaaagttcaattaagaaaattagaagaaattaatgatatttttgaagaaatggaaaatggtactataactggtagaatggttattaaattttaaaaatatcaactgactatatagataaagaaggtagtgctctgaacactatcattataatcgaacacgaggttttcatgaaagatagtgaaaatctcgtgtttttttggttttgaggtgttgtttgtattttataaaatggcttacatatatgaagcgttgattaagtatggaattgttaattaattgaacctatttagctttaagaaggcataacaagatgaccttattttatgctataatatttctattatgcgaagattaaggtgagtagtaaattggataaaaaagtaagtattcaaacaaagcaagtgttgaaacagcacaacgaaaaagaaaaatttgaatttactactgaaggaacttggcaacaaaggcaatctaactttattcggtatgtagaacaaattgaggatgcaacagttaatgttacaataaaagtggatgatgatagcgttaagttgattcgtaaaggcgacattaatatgaatttgcattttgttgaaggacaaacgacaacaactttttacgatatatcggctggacgaattccactagaagttaaaacattacgcattttacatttcgtaagtagagacggtggcaagctaaagattcattatgaattatatcaagataatgaaaaaatgggttcttatcaatatgaaattaactataaggagataggcgaatgaatattattgatcaagtgaaacaaacattagtagaagaaattgcagcaagtattaacaaagcaggattagcagatgagattcctgatattaaaattgaagttcctaaagatacaaaaaatggagattatgctactaatattgcgatggtactgactaagattgcaaagcgtaatcctcgtgaaattgctcaagcgattgttgataacttagatactgaaaaagcacatgtaaaacaaattgacattgctggtccaggattcattaatttttacttagataatcagtatttaacagcaattattcctgaagcaattgaaaaaggtgatcaatttggacatgtaaatgaatcaaaaggtcaaaatgtattgcttgagtatgtttcagctaaccctacaggagatttacatattggtcatgctagaaatgcagcagttggtgatgctttagctaatattttaactgcagctggctataatgtaacacgtgaatattatattaatgatgctggtaatcaaattactaacttagcgcgttcgattgaaacacgtttctttgaagctttaggtgacaatagttattcaatgcctgaagatggctataatggaaaagatattattgaaataggtaaagatttagcagagaaacaccctgaaattaaagattattctgaagaagcacgtttgaaagaatttagaaaattaggcgtagaatacgaaatggctaaattgaaaaatgatttagcagagttcaatacgcattttgataattggtttagtgaaacatctttatatgaaaaaggcgaaattcttgaagttttagcaaaaatgaaagaattaggttatacgtatgaagctgatggcgctacatggttacgtacaactgattttaaagacgacaaagacagagtattaattaaaaatgacggtacatatacgtatttcttaccagatattgcgtaccacttcgataaagttaaacgtggtaatgacattttaatcgatttatttggtgctgatcatcatggttatattaatcgtttgaaagcatctcttgaaacgtttggtgtagatagtaatcgtttagaaattcaaatcatgcaaatggttcgtttaatggaaaatggtaaagaagtgaagatgagtaaacgtactggtaatgcgattacattaagagaaattatggacgaagttggcgttgacgctgcacgttatttcttaactatgcgtagtcctgatagtcactttgattttgatatggaattagcgaaagagcaatctcaagacaatccagtttactatgctcaatatgcacatgcgcgtatttgttcaattttaaaacaagcgaaagagcaaggtattgaagtgactgctgcgaatgattttacaacaattactaatgaaaaagcgattgaattgttgaaaaaagtagctgactttgagcctacaattgaaagtgctgcagaacatagatcagcacatagaattactaattatattcaagatttagcttctcatttccataaattctataatgctgaaaaagtgttaacagatgatattgaaaaaacaaaagcacatgttgctatgattgaagcggtcagaattacattgaaaaatgcattggcaatggtcggtgtaagcgcacctgaatcaatgtaagaacatttatatacactccaacgtagagtttctcgaaagatactttgtgttggagtgttttttttaggtatgtgacatattggggaatgcttagtatgtgaataaggttaagaggaacacagttggatgctactgcacaactgcataagagagcctgagacataaatcaatgttctatgctctacaaagttataatggcagtagttgactgaacgaaaattcgcttgtaacaagcttttttcaattctagtcaaccttgccggcggggccccaacaaagagaaattggattcccaatttctacagacaatgcaagttggggtgggacgacgaaataaattttacgataatatcatttctgtcccactccctctaaaatggagggtgtaaatgttaggaactgatgaattatataaagttttatatgaacatctcggaccacaattttggtggcctgctgataatgacattgaaatgatgttaggtgcaattttagttcaaaatactagatggcgaaatgcagaaattgcattgaatcagattaaagaacatacgcattttaatccaaatcatatattagaactacctattgaaacgttacaatcattgatacattcaagtggcttttataaaagtaaatcactgacgattaaaacattattaacatggttagcacgacatcatttcaattatcaagagattaatgagcgatataaaggtggattaagaaaagaattattatctttgaaaggtattggaagtgaaacagcagatgtcttacttgtttatatattcggacgtattgaatttattccagatagctatacaagaaaaatatatgataaattaggatatgaaaacactaaaaattatgatcaattaaaaaaagtagtcacattaccaaatcattttacaaatcaagatgctaatgaatttcatgctctgttagatgtatttggtaaacattactttagagacaaagatataaagaattatgattttttagaaccttactttaaaaagtaaacgctgtgaagttagatagatgagtttatatgaaatataaaaaataatttactattttcttttagtatgtggacttatataataaatagaagcatataaagtaaaaaacagttggatgctaccgcgcaactgcataaaagcctctaatcgctaaaggtgaagaggaacgcagttggatattaaggcacaactgcataaaagcctctaatcactaaaggtgaagaggaacgcagttggcttgcttgcgcacaactgcataaaagcctctaatcgctaaaggtgaagaggaacgcagttggatgctaaggcacaactgcataaaagcctctaatcgctaaagctcaagaggctttaaaaaggagatgtgatagtgtgaagaaatcgttaattgcttttattttgatttttatgcttgtcctgagtggctgtggtatgaaagataatgataaacaaggtagcaatgataatggctcgtctaaatcgccgtaccatagaattgtttcgttaatgcctagtaatactgaaattttatatgaattaggattaggtaaatacatagttggtgtttcaacggttgatgattatccaaaagatgtgaaaaagggtaagaaacaatttgatgctttgaatctaaataaagaggaacttttaaaggcaaagccagatctaattcttgcgcatgagtcgcaaaaggcaactgctaataaagtattgtcatcattagagaaacaaggcatcaaagtagtgtatgttaaagatgcacaatcaattgatgaaacttacaacacatttaagcaaattgggaaattaacgcatcatgataagcaggctgaacaacttgttgaggaaactaaagataatatcgataaagtcatagattcaattcctgctcatcataaaaaatcaaaagtatttattgaggtttcatcaaagcctgaaatatatacagcagggaagcatacattttttaatgatatgttagaaaaattagaagcccaaaatgtgtatagtgacattaatggttggaaccctgtaacgaaggaaagtattattaaaaagaacccagatatattaatttcgacggaagctaagacaagatcagattatatggatatcatcaaaaaaagaggtggattcaataaaattaatgctgtcaagaatacacgtattgaagttgtaaatggtgatgaagtatcaagaccaggtccacgtattgatgaaggattaaaagaattaagagatgcaatttatagaaaataaaccattctaattatgccccttattgctacatgtaaaaaatacatgtttgagataaggggtttttaaaatatatttagtgaatgatagcaacgcgagtatgtgattgctataatgaatgtaattatcgatgaaagaaaagagaatgctatgacatttaataaagtattattgagctggatagtcatattgattataacaactagcatatatctattttggcagttgggcgatatcaatgatgtatttaaccagtctattttaatcaatgttagattaccgagattattagaagcattgttgacaggtatgatattaactgttgcaggccttatatttcaaacagttttaaataatgcattggcagatagctttacattaggattggcaagcggcgctacatttggttcaggattagcattatttttaggtttaacaacgttatggattcctgtattttcaataacatttagtttgataacattaataactgtattagtcattacgtcggtattgagccaaggctatccagttagaatcttaatattaagtggtttaatgattggtgcgttattcaattcacttctatattttttgattttattaaaacctcgcaaattaaatacaattgccaattatctgtttggtggttttggtgatgcagaatactcaaatgtatctataatagcaatcacatttatcattgcattgtttggtatatttatcattcttaatcaactaaagttattgcaattaggagaactaaaaagtcagtcactaggcttaaatgttcaattgattacatatatcgcgttatgtatagcttctatgataacggcgataaatgtcgcatatgttggcatcattggattcattggtatggtgataccgcaactcattagaaaatggcagtggaaacaatcattaggaagacaattggctttaaatattgtaactggaggacaaataatggttatggcagattttattggtagccatatattgtcaccagtacaaataccggcaagtattatcattgcattaattggtataccagtgttattttacatgctaatatctcagtcgaaacggttacactagcacacgacatttgctaaaataaaaataactataaacataaagagggcataagcgatggatttgaatcaaattaaagcagttgtatttgatttagaaggtacgttgttggacagagttaaatctcgagagaaatttatcgaagagcaatatgaacgatttcatgactacttaattcatgttcaactggcagattttaaaaaagcatttattgagctagatgacgatgaagataatgataaacctgatttatataaagaaatcattaaacgtttccatgtagataggttaacttggaaagacttatttaatgattttgaaatgcatttttatcgttatgtatttccttattacgatactttgtatacactagaaaagctatcgcaaaaaggctttcaaattggtgttatcgcaaatggtaaatctaagattaaacaatttcgattacattcacttggtttgatgcatgttattaattatttatcaacatcagaaacagttggttttcgtaaaccacatcctaaaatttttgaagatatgattgatcaactaggggtattacctgagcaaattatgtatgttggcgatgatgcgttaaatgatgtagctccagcacgagctatgggcatggttagtgtatggtataaacaagaagatgctgaaattgaaccactcgaagaagaagttgattttacaattacaacagtggaagaattattaaccattttaccaataaaaaatgataataaaggagaaaattatggatctatttactagaaaagatggaacatcgatacattacagtacattaggtgaaggctatcctatcgtattgattcatactgtacttgataattattctgtgtttaataaattagcagcagaattagcaaaatcatttcaagttgtgttaattgatttacgtggacatggctattctgataaacctcgtcacattgaaataaaagatttttctgatgacattgttgaattacttaaatatttatatattgaagaagttgcatttgtatgccatgaaatgggtggaatcattggtgcggatatttcagtacgttatcctgaatttacatcatcacttacgttggtaaatccaacatctattgaaggtgaattaccggaagaacgtttatttagaaaatatgcccatattattcgaaactgggatcctgaaaaacaagataaatttttaaataagcgtaagtattatcgtccgagaaaaatgaatcgattcctcaaacatgtcgtagatacaaatgaaatatcaactaaagaagaaattcaagcagttaaagaggtattcaaaaacgctgatatttctcaaacttatagaaatgtcgtagtaccgacaaaaattattgcaggagaattcggtgaaagaacaacaagattagaagctaaagaagtagctgatttaatccaaaatgcggactttgaagtatatcaagaatcaagtgcattcccatttgttgaagagcaagaaagattcgtcgaagatacagcttcatttatcaacaaacatcacgatgaaaagcatgtttaatttttagtgataagtgaaatataaaagtagtaattattatttgtaatataattgtaatatgactgttgttttagaaatgattgttgtataatggttgtgagcacaagacgatataaataaaaggagagagtgcttatgaaaaagctactaacggcaagtataattgcatgttctgttgtaatgggagtaggcttagcgaacactagtgccgaagcagcaagtggcaactctattgatactgttaaacaattaattaagggtgatcagtcattagaaaatgtgaaaattggcgaatctattaaagatgttttaactaagtacaaaaatccgatgtattcttacaatgaagatggaactgaacattattacgaattccataccaaaaaaggtatgttattagtaactactgatggtaagaaaaacaatggtaaagtaactcatatttcaatgatgtataatgatgctaatggtccaacatatcaagctgttaaaaattatgttggcaaagcagtaacacatacggaatatagcaaagttgctggtaattttggatatattgaaaaaggcaaaacgacttatcaatttgcctcagcaccaaaagataaaaacataaaattatatcgtattgatttggaaaaataataattaaattaatcgtgcttaaccgacaagttaaatcgcaatacttgtcggttattttattacatggcataatacagtgaatattaatttttatgatttgcgaaggggatattaaaccaatacaataaataaagatgtttcattttaaaggagtactaccaatgcgtattaacgataaaattttactagaaaatatagaagattactttaatcataaaggtttatcaccgcatttgattgatgatattaaagagaaagtaattactgatataaaaaattctgaaaagaaagatcaagattatattgaatataaaagaaaatctccagcacaaatcatattaatgattcaaaggaatttgtttgctttacaaatgaatccagttattttctttattataaacttcattctcatatcctatttatatgataaacagtatgttcagtttcaagctattactggaatgagtctattttattgtttagtgatttttccaatgactattgttgtatacctaagggtgtctcaaaagaattacttgcgtagtaataaaatagaaatgattatgggtacaattatcgctatcatatccttgttattaattatattacaagcatttaatattacttggggcgttataccaattacaaattttggacatcaatttttctttttcattggtattattttagtaattgccggcatattttataagcgacttgagttttcgggaatcgggttattattttgtcaaaaaaccgtcgatgcaatgattcataatccacaatcagcacagattttttcattaattatatggatattattagtagttctagttatatatttcacaattagattatcttcacgtacaagattataaatatgataaaactattcacttgattaattgtattaattaagatgaatagtttttttattgttggaataacttttggtaatttataaataatttaaaaaaattgtttataaaatggaagcgtatatagaatgaaggttgggtatatagtttattgagggaggtgtcacaatgaataaagtcacaattaatcctcaaatccaattaacttatcaaattgaaggtaaaggggatactataatattacttcatggattggatggtaatttagctggatttgaagatttgcaacatcaactagcatcatcatataaagtacttacttacgatttaagaggtcatggcaagtcttctaaaagtgaatcatacgatttaaacgatcacgttgaggatttaaaaattctaatggagaagttaaatattcatgaggcacatattctaggacatgatttaggtggggtagttgctaagttatttacagataaatatgcttatcgtgtaaaatcattaacaaccattgcatcgaagaaagatgacttaatacacagctttactcaattgttaatacaatatcaagatgatatagcgggttttaataagtctgaagcgtatattcttttattttctaaattgtttagaaatcaagagaagacgatgaaatggtatcaaaaacaaagaatatatagcattaagtctgaggatgatagtgcggtggcaattcgttcattaattttgcataaagatgaacctatgtatttaaaaaaacgtacatgtgtacctactttgttaattaatggggaacatgatcctttgattaaagataaaaatcattttaaattggaagcacattttttaaatgttacgaaaaaaatcttcgaacattcaggacatgcaccgcatattgaagaaccagaagcatttatgaattattatttaaattttttaaaaagcgtatcataatatgtgatatataaacctagggcataaagtccttaggcaatgtgaaaaagctgattactattcattatttgatagaaatcagctttttttgaaatgtatttgatatatactgctcgttatgcggctatcttccttatattaagtgccattagtgcaaaacctcttaacatttaggtaaaaagagcataaaaaaaggaagtttaatagaatgtatcatctatcaaacttcaccaaattgcgctaaacaaaattatagttcaatttcgttgtttgcttcagtgattcgtttatttactcgactcaataatgattcgatttttttacgttgttgtgcattaacaagaattaatacagttctttcatcatgctcattacgttttttatcgaagtaatcttcttgagataaaattttaactgctttaacaacttgtggttgtttgtagtttaaatgattaataatatctttaagatagtattctttctctttgttttcgctgatgtatgtcaatacagcgaattcttcaaagctaattgaaaattcctttttaattaaactttttaatttgtcagcataagtgaccattgataacaactcaaagcaatcattgatttttgtaattgccatgtttaaaacctccctatttgatgcatcttgctcgatacatttgcccgataatatattgatatctaatctttatttattatagatatgttagtcataattttgcattaaataagttttattaaatatatttaatgctctattatttagttaattataactaattaaaaatgagaagtaaacaaaaaagtgtttataaaacaaattattcattagacacagtgattgtatttctgggttagcatttggtttagtcaaaaatatcagcattttttataatttaccttaatttaatcgacaatacaaggtaatttatttaatgaaacgatttagcgcaattaaatgtttcgatattcaatgtgtgtctaaagagattctttgttatagcttaactcttccaagttaacttcttctactatttatacccatttttcagaattttatcactaaaaatgaaaaatttttataattttttaatttagtaattctcagtgcagttttaatgataagaaaaacacattaatttagtgattaaaaccaatctatagcacgttaaagtgtctatacgttattccgattgataacgggtaacaaataatagaaagtacgataattgatcatgtattaaagcacctttatttttcaaactcgactcaatgaattataaaaagttgtgcattttgacttatttttaattaattgaataaccaactatgaaatattagcacgaataacataatttttgctattaatttggtgtaaattattaaaaaataacattaatttaggtcttaagaatgagttgactatcgaatttgctaaattaaaatttgttgtgtcaaagcatactacccaaatcaacgattttctaaagatttttagaccacaaaaaaatagcttatcacttttaaaaataattacaagttaaaatgataagctaaaagttaaattaaaataatcttaaaagtataatgcctgtcaaaatacataatagaccaatagtttttctggatgtcattgctattttcggtgaactaaataatccaaagtgatctatcaatatgcccattagaatctggccaaacatcccaataagtgttgttaatgctgcacccatatgaggcattaagataatgttagctgttacaaaagccatgccaagtataccgccagtaaaatagataggctttaatttaccgaattttaaatgacttgtttttagttttaaagaacgattaaaaatagcggttaaaatcaatagcattattgacccaattgtaaatgatactaatgatgcaaaggctggtgaatgagtatgacttgctaaagcactattaattgtcgtttgaataggtggaaagaaaccaaaaataaatcctaagagaagccaaaacagtaaatacttttgatcagttagtaataaattattcttgttaaattgattcattatgacgatgccgacaatgagtaacaatactccaattgctttaattaaattaaaatcatgaattgtagcgccaaataagccaaatgtatcaataatgacacccataataatttgacccgcaactgttgcaatgacagttaatgttgcacctaattttggcaataacaataaattgccagttaaaaagctaaccccaagcaaaccaccgactacccatgtgtagttaaatgattgattattgtaaaagtgaatagtaaatacttctggattgataatgatatttaaaataattaaacaaattgttccaactgaaaatgaaatgaatgaagtatagaaaggcgatttagtatacagtgatagtcttgaattgacagatgtttggataggaataagcattccaactaggacaccaatgatatagaaaagaagcatatgaataaagtctcactttccaaagttaataataaaatcatatgtatacattatcattatagagaaaatatacaactcatttacaataatgttgaaaaaaacaggacattatcacaacaaaatcaccctagacaatcatgatgaaagtctagggtgttagtatttatactaaattaattgcgttttctttatatctatttcttatcttcaaataaaacagttgttgttttatcaataatttgagcagaatgtactttggtgatagtaccactatttgactttataatatttaaatctactaatgcattcatactatcacgtacaacttgctcggtcactacgttgtttaattgtggtaattgcagttttacaggcttgtctagtgaagatttaaaacttaattcaagtgttttagtcatgaatatgtcctcctgattaaattgataaagatttgatgagttcgatattgctatatgtttctccagtaagtcgctcaataagtttgctgaatgttttaatttggtcgtttgatgcatcagggttaatgttagcgaatcgacgcttaaattctgtttgtttgccgttagcgtctactttagtaaatgataatacaatagtgatgtggtttattttactcatattttaaaacctcctttcacactatatatcgaaacaaaataataaaatggctaattttattttctatgtttaaaatctataaaaaaggcaatagatatatgtaactaaaatataatatagctatgattaagacacttaaagcaaggggaggttgagtaatgaataaagtagaagcgattaaatttaatgatgatattgttaaaatgtatgaagcgctcaagataaaatctgaacgtgactatttattctttaagttagctatacatagtggattgaaagtatcagaattattaacaattacagtctctcaagttaagagactaattgaaaagtgtacgttatcagaaatgtgtaaagcacattttcattcgttgattaaaattaggttaccagaaacattatcgaaagaactacttcaatatatagaggacaggagtctttcgaatgaagacgttctttttcaatcactacgaacaaatcaagtattatctagacagcaagcatatcgaataattcaccaagcatcaattgaagctggtatagataatgtaggactaacgacattgcgtaagacatttgcatatcatgcttatcaaaaaggtatacctataccagtcattcaaaagtatttagggcatcaatctgctattgaaacactaaattttatcggtttagaaaatgagtgtgaacatagtatttatatttcattacaattatagaaacaaaggaggctaataatgagtttggtttatttattaattgctatacttgtgattatggcgatgatacttctaatgtctaaacgtagagcattggctaaatatgccgggtacatagcgttggttgcacctgtaatttcatctatctattttttgattcaaataccatcagtagctaaactgcaatatctttctacctctattccatggattaagacattagatattaatttagatttacgtttagatggtttaagtttaatgttttctcttattatttcacttattggaattgcagtattcttctatgcaactcaatatttatcctctcgaaaagacaatttaccaaggttttatttttatttaacgttatttatgttcagtatgattggtattgtattatcagacaatacgatattgatgtacattttttgggaattaacgagtgtatcatcatttttattgatttcatattggtataacaacggagatagtcaatttggtgcgatgcaatcatttatgattacagtatttggtggtttggcattattagttggttttatcatgttgtatattatgacaggaacgaataacatcacagagatattaggacaagcagatcatattaagaatcatggattgtttatccctatgatttttatgtttttattaggtgcatttacaaaatcagcacaatttccatttcatatttggctacctagagcaatggctgcacctacacctgtaagtgcttatttacattcagccacgatggtaaaagctggtatctttttattacttcgatttacaccattattaggtcttagcaatatgtacatatatatcgtcacgtttgttggtttaataacaatgttatttggttcaatcacagctttaaaacaatgggatttaaaaggaatcctagcatattcaacaatcagtcaactaggaatgattatggcaatggtcggtatcggtggtggatatgctcaacaccaacaagacgcaatagcatctatttatgtatttgtattatttggtgcgctatttcatctaatgaatcatgccatctttaaatgcgcgcttttcatgggagtgggtattttagatcatgaagcaggttcaagggatatacgaattttaagtggaatgcgtcatctatttcctaaaatgaatctagtcatgacaatagcggctctatctatggctggagtaccatttttaaatggatttttaagtaaagaaatgtttttagatgcattaacacaaactggacaattatcccaatttagtttgatttcaatgatagctatcgtgtttcttggtgttattgcgagtgtttttacattcacatatgcactatacatggtaaaagaagtattttggacaaaatatgattctaaggtttttactaaaaaaaatatccacgaaccatggttgtttagtttaccatctcttatattaatggtgctagtacctgtaatcttttttgtaccaaatatatttgggaaggggattatcgttccagcattaagagctgtatcaggtggtaatcatcaaattgatcaattggcaccacatgtttcgcaatggcatggatttaacataccgcttcttttaaccatcatcattattttattgggtagtgtactagcaatcaaagtagattggaaaaaagtgttcacgggtaaaattagacagatttcagtttcaaaaagctatgagatgttatatcgacattttgaaaagtttgctacgaagcgatttaaacgtgttatgcaagatcgtttaaaccaatacattattatgaccttaggcatatttatgattatcattggatatggttatattcgaattggacttcctaaagtacatcagttacatgtttctgaatttggggcattagaaattatattagcaatcgtaactgtcacaattggtatttctttaatttttatacgtcaacgactgacaatggtcattttaaatggagtcatcggatttgttgtgaccttattctttatagcaatgaaagcccctgatttagcattgactcagctagtagttgaaacaataacgacgatactatttattgtcagtttttcaagattaccaaacgtgccaagatctaacgctaacaaaaaaagagaaataattaaaatttctgtatcactcttgatggcacttattgttgtatcattaatttttattacacaacaaacagatggtttatcatcaatatcagacttttatttaaaagctgacaaactaacaggtggtaaaaatattgtaaatgcgatacttggtgactttagagcattagatacattatttgaaggattagtgttaattattactgggctaggtatttacacattattaaattatcaagatcggaggggacaagatgaaagagaatgatgtcgtgttaagaacggtcacgaaacttgttgtatttattttattgactttcggattctatgtcttcttcgcaggccataataatcctggtggtgggtttattggtggtttaatatttagttcagcgtttattttaatgtttctggcttttaatgttgaagaggttttagaaagtttaccgattgattttagaattttaatgattattggagcattggtatcatctattactgcgataatacctttgttttttggaaaaccatttttgtctcaatatgaaacaacttggatacttccaattttaggacaaattcatgtaagtacaataacactttttgaattaggtattttattctcagttgttggtgttattgtcacagtgatgttgtcgcttagcggaggtcgatcatgaatttaatattattactagttataggatttttagtgtttataggaacatatatgattttatcaatcaatttaattcgtattgtaatcggaatttcaatatatactcatgctggtaatctcattattatgagtatgggaacgtatggttctagtagatcagaaccactaataactggtggaaaccaattgtttgttgatcccttgttacaagctattgtactaactgcaatagttatagggtttgggatgactgcgtttttacttgtacttgtttatagaacttataaagtaacaaaagaagatgaaattgaaggcctaaggggggaagatgatgctaagtaacttattgattttaccaatgttattaccattcctttgtgccttaatccttgtatttttaaaaaataatgatcgtatttctaaatatttatacttaggtacaatgactatcaccacaattatttcattaatgctattaatttatgttcagcgtcaccgtccaattacgctagactttggaggatggtcagcgccctttggtatacagtttttaggagattctttaagtttaattatggttacaaccgcttcgtttgtgattactttaattatggcatacggatttgggcgtggcgaacataaagcaaatcgttatcacttgccatcgttcatattatttttaagtgttggcgtgataggctcttttctaacatcagatttatttaatttatacgtcatgtttgaaattatgttactagcgtcatttgtactcattacacttggacaatctgtagaacaattacgtgctgcaattatttatgttgtcttgaatattattggttcatggctattcttattaggtataggtttactttataaaacagtaggtacattaaacttttcacatattgcaatgcgtttgaatgacatgggagataatcgcactgttacaatgatttcattaatcttcttagtcgcatttagtgcgaaagcagcgctggtcctttttatgtggctacccaaagcctacgctgtgttaaatactgagcttgcagcattatttgcagcgttaatgaccaaagtaggggcctatgcattaattcgattcttcactttactatttgatcaacataatgatctcatacatccattgctagcaactatggctgctataactatggtcatcggcgctataggtgtcattgcttataaagatattaaaaagattgcagcttaccaagtcataatctcaataggatttatcattttaggtttaggaacaaacacgtttgcaggtattaatggtgcaatattttatttggtaaatgacattgttgtaaaaacattgctattttttattattggtagtttagtttacattacaggctatcgacaatatcaatatttgaatggcttagctaaaaaagaacctttatttggagttgcgtttattataatgatttttgctattggcggcgtgcctccatttagtggctttccggggaaagtacttattttccaaggtgcattgcaaaatggcaattatattggactagcgttaatgattattactagtctaattgcaatgtacagtttatttaggatacttttttatatgtattttggagataaagatggggaggaagttaattttaagaaaatcccgctatatcgaaaaagaattttaagtattttagtagttgtggttatcgcaatcggaattgctgcacctgttgtgttaaatgttacaagtgatgcaactgagttgaacacgagtgatcaattatatcaaaaacttgtaaatccgcatttgaaaggagaggactaaatgaatcaaatagttttaaatattatcattgcattcttatgggtattatttcaagatgaagatcattttaaattctcgactttcttttctggatatctaattggtttaattgtcatttatatattacacaggtttttcagcgatgatttttatgttagaaaaatatgggtagctattaaatttttaggtgtttatttatatcaattaataacatctagcattagcacgattaattatattctttttaaaacaaaagatatgaaccctggattactttcatatgaaacaagactaacaagtgattgggcaataacatttttaacaattttaattattataactccagggtctacagtaatacgaatttctcaagactctaaaaagttttttattcatagtatcgacgtgtcagaaaaagaaaaagatagtttgttaagaagtattaagcattatgaagacttaatattggaggtgtcgcgatgatacaaacaataacacatattatgattattagttcactcattatttttggaattgcattaatcatctgtttatttagattaatcaagggacctacaacagcagatcgtgtcgttacatttgatacaacaagtgctgtcgtaatgtcaattgtgggtgtgttaagtgtacttatgggcaccgtttctttcttagattcaatcatgctcattgccattatatcttttgtaagttctgtttcaatatcacgctttattggtggggggcatgtgtttaatggaaataacaaaagaaatctttagtcttattgctgctgtgatgttgttgttaggtagttttattgctcttattagtgcaataggtatcgtgaaattccaagatgttttcttaagaagtcacgctgcgacaaaaagttcaactttatccgtgttattaactttaatcggtgtattaatttattttattgtgaatacaggatttttcagtgtgcgtttattactgtcacttgtttttattaatttaacttcaccagtcggcatgcacttagtcgctcgcgctgcttatcgcaacggcgcttatatgtatcgaaaaaatgatgctcacacacatgcatcaatattattaagttcaaatgaacaaaactctacagaagcattacaattacgtgctaaaaaacgagaagagcatcgtaagaaatggtatcagaacgattgaagtgttggctaaactgttaagcataacaatgcttttgaaaatctgttttcaaaattaatcattaaaagagtactttgaaattggttggtcgattttaaggtgctcattttttgtattataagttaatgttgttatgtgaaagcaagttgtttatttatacaaacaattagtgataaaataaaattaaataattgcaaatttaagtactgcaatcgtagacaaatatctatattaaagtgcttttgtggtcgctaactcaatttatcctctaaagtataattacaacgagatgtgatacttaattttcaattaaacaatactttttagagaggtgaaagtttggaaatatttgaaacaattcttatatttatagctgttgtgatactaagttcgtttgtccatactttcatacctaaagtacccctagcatttatacaaattttcttgggcatgttactatttattaccccaatccctgttcaatttaattttgattctgaattgtttatggtaacaatgattgcgcctttgttatttgtagaaggtgttaatgtttctagagtccatttaaggaaatatattaagccagtgatgatgatggcattaggattagtcattactactgtgataggtgtaggtttatttattcattggatttggccagatttacctattggagcagcatttgcaattgctgccattctttgtcctactgatgcagtagcagtgcaagcaatcactaaaggaaaggtcttgccaaaaggagcaatgacaattcttgaaggtgagtcattattgaatgatgctgctggtattatttcatttaaaatagctgttggagtattagttacaggtgctttttcacttgttgatgctgttcagttgtttttaattgcatcaattggtggcgcagtggttggtttacttataggtatggcattagtaaggttccgattaacattgatgcgtcgaggatatgaaaacattaatatgtttacaattattcaattgttaacaccatttgttacgtatttaattgctgaattgtttcacgcatcaggaatcattgcagcagtagttgcaggacttgtacatggtttcgaacgtgacagaattatgcaagtacgtacacaactgcaaatgagttacaatcatacatggaatatactaggttatgttttaaatggctttgttttttcaatattaggatttttagtacctgaagttattattaaaattatcaaaacagaaccgcacaatttaatctttttaataggcatcactattgttgttgctttagctgtctatctatttagatttgtttgggtttatgtcttatatccttatttttatttagccatcagtccattccaaaaaatgatgactaaaaatgatgatgataatccaacgactgagaaaccaccaaagcgaagtttatacgctttaattatgacgttatgtggtgtgcatggaacaatttctttagcaatcgcattaacgttaccgtattttttagcagggcatcatgcttttacgtatagaaacgacttattatttattgcatctggtatggttattattagtttggtagttgcgcaagtattattgccattattaacgaaacctgcacctaaaacagtaattggcaatatgtcgtttaaagttgctagaatttatatattagaacaagttattgattatctaaatcaaaaatctactttcgaaacaagttttaaatatggtaacgtgattaaagaatatcatgataaattagcatttttaaaaactgtagagaaagatgatgaaaactctaaagaattagaacgtctacaaaaaattgcttttaatgtagaaacaaaaacattagagtctttagtagatgaaggacaaataacgaatagtgtacttgaaaactatatgcgttatgctgaaagaacacaggtatatagacaagcatcattaataagaagaatgattgtattattacgaggtgctttattaaaacgaagagtacaaacgagagtgaactccgcatcttcacttagtgttacggataacttaatggaattaaataaaattaataaattagtccattataatgtggttagtcgtttgtctaaggaaacaacaaaagataatacacttgaagttggaatggtttgtgacggttatttaatgcgaattgaaaacttaacaccatcaaatttcttcaactcagcaagtgaagatacgattactaaaattaaattaaatgcattgagagaacaacgtcgcattttacgtgagttgattgatacagatgaagtatcagaaggtacagctttgaaattaagagaggcaatcaattacgatgaaatggttattgtagatagtatgacgtagttcctaattatgctaaaagggattgatgaaaaactgaagggcttttcatcaatcccttttattttatgggaattgaatagatagttttaaactatacgaattattaatatttgagatttaattgaaataagttttaaaaattggaggagatagattaagtgaagtcatttaaaggtgaagttaagtgtattcacaaaaaatagccacactcatatgacatcggatgagtgtggcttaaggatctatggggggaggaaaccatagatgtttactttgataggccagattaaatatcaaagtatgcgattatttatagcttgatgcaaaagtggtatgcctattaaaagttactgcacatagcttttaatattccgttcaaaggaaaggggcatacaattgaacaatctgtaatagtacttttaaccagctatgctaaaagtctagtagggagaacagttgtccaatcacataagaacctctaacttcgttagtacgattaagaaaagctttttagttagtatgtaatacaatttattgacgcgcgtgaatctcttttataagagtgtgtagggaatggcgttgtataaattgtattagaagaacttctaacgcatctctgtggttaaaagagatgaagggaacgacagtttaattaaaactgcataagaacttctagcttttctctttcgttcaaagagaagttctaataccaccatatcgtgcgatcgggaacggtatatatattaataggagggtaatatatatttaacgcacgatatgggactattagccttcgactttgttatgttgatgtgtggcctaaaatattggagataccaatattttaggttgcatcaacatcaattcatcttacttcattaaaacacagcgtgttatttcatgcttccgtgtacagtttcaatatttgatttcatcattttgtagtaagagtcacctttagtgccttctttaccgattgaatctgtgtacacttcaccaaagatatctttcttcgtttcttcagataaactttccattgctttcttatcaacacttgtttctactaataagtgttttaatttgtgctttttaacaaactcaatagcttgtctcatttgttcaggtgtaccctgtttttcagtgttaatttcccaaatataacctggtgtaataccgtattgttttgagaagtacttgaaggcaccttcacttgtaatcatggcacgttgttcttttggaatgtcattaaatttgtctttactgtcattatttaatttttccaattgagcaatgtatttgttaccttgcttttcataatctgctttatgttttttgtcgttatcgataaatgtttgttgaattgtttttacgtatttaataccgttatctaaacttaaccatgcgtgtggatcttgtttatctttgttgccttcttcaccgtttaaatagataggtttaacatcttttgatactgcgataacttttttatcttttaatgatttaccagcctgttctaaggctttttcaaaccaaccgttaccagtctctaaatttaatccgttgtataaaataacgtcagcgtcagttaactttttaatatctttaggtttaacttcatattcatgaggatcttgaccaacaggtacaatactatgaatatcgacgttgtctccaccaacatttttagccatatcatataaaattgaattcgtcgttactacttttaatttgccatttgacttatcactgctttgtttaccaccagtaccacatgcagcaactagaagtaataaggctaataataaaggtactaattttttcatgttaaacttcctcgtttctttctattcgtaaattttgtgaaaaataatgtgatgatataaattacaaacgtacaaagtacgattgtcgcaccactaggaatgttgtaaatatagctgtaataaagtccgacaattgaacttatgacacttattaaacttgctataatcatcattgagtatagttttttactaattaaaaatgctgtagatgcaggtgtaattaataatgcaactacaagaataatacctaccgtttgaatacttgctactgttactaatgagagtaacaacatcacaaagtaatgtaataacgtcgtatttagaccactcattctactaaacgttggatcgaatgtagaaatcattaatggacgatagaaaataatgattagaataaggacgattgaaccaatcacaatagttgttaaaaatgcactatttgtgattgccagtaaattaccaaacagaatatggtacaaatctgtcgtagtgtttattaagctaataataataatccccgaagctaagaaagcggtaaaactaattccaatagcggcgtcaggtttcgttttactactagatgtgatataaccgataaaaatacttgcgatcataccagttataagtgcgcctacaaacattggaataccaaataagaatgatagggcaacaccaggtaatactgcgtgactcattgcatctcccattaatgaaagaccacgtaatacaattaaactaccaactgtaccacaaactatccctacaataattgaagttatcaatgctcgattcaagaattgatatgtaaataaatgttcgacaaactctaacatgttatattgctcctttgactagggtcactacagtcagtgctactcataaatgtttcgtttaagcgagtgacactcatagcctcttcactatcaccaaagtatcgtaatgtttgatttaatagaataatgcgatcaaagtattgctttgcttttgatagatcatggtggatgataagaataagttttccttgttgttttaagttctcgatttttgtcatgattaatttttcgctactaaaatcaattccgacaaacggctcatctagaaaataaacttcactttcggacatcaatgctcttgctactagcacacgttgtaattgtccaccacttaattctgaaatttgtcgatgacgtaaagattctaattctaaatcgcttaataactgtttgagtttatcccttgctgatttattaggtcgtctaaaccatccaatttctttgtagcaacctgataaaatcacttgttccacacttataggaaaatctaaatcaatatgtgctttttgtggaatatatgtaatatgttgcagttgttgttgtataggtttgttatataacaatttagtaccggtagcattaaattcaccaattaaagacttgataagggaagatttaccagcaccattcgggcccatgataccaattatttcgccgcgtactggtatcgataaggaaatgtttttaagtacatgcttattacctaaaaacagatttaaatcttttgtttctaacaaacgtttatacctcctaattaaaagtttaggctaacctaattaattgtataataaactgagaatatttatcatgtcaagtaaattcgtgatataatatagacaatgtatgtgaggtgaaagtatgttaactgaagaaaaagaggactatttaaaggcaatccttacgaataatggcgataaaaactttgtgacaaataaaatcttatctcaatttttaaatattaagcctccatctgtaagtgaaatggtaggacgtcttgaaaaagcaggctatgttgaaacaaaaccatacaaaggtgttagattaacagaggatggtttaacgcatacgcttgatatcattaagagacatcgactattagaattatttttaatagaaatattgaaatataattgggaagaagtacatcaagaagcagaaattttagaacatcgaatttcagatttatttgttgaaaggctggatagcctgttaaatttcccagaaacttgcccgcacggcggtgtgattcctagaaataatgaatataaagagaaatatataacaacgattttgaattatgaacctggtgatatcgttacaatcaaacgtgtgagagataagaccgatttgctaatatatttgtctagtaaagatatttctattggtaatgaagtggaaattgtatcgaaagatgaaatgaataaagtaattatcattaaacgtaatgataatgtaattattgtcagttacgaaaatgcaatgaacatgtttgctgaaaaataaaataaagaagccataaagatatccatgattgaactgataaagacatatggataattgctttaggcttcttttttattagttaatttatcaagtgagtatatttgagtaaaatattcactgcataaagattgaagataatccagattgtactataaatgaagataggtacatgactgagttctttaagtgcactaccatcccactgtggactcggacgctggaaagtcaatttagcaatcgtccaactagattgtagaacttcgcctaataatacacctaaaatatattgataactcattgtgacaagtagttgaatttctactatattttcatcttttaatataaaatacaacatgatagaaattaaagttataacaacaatgggtgagccttttctagatgttaaaattaaaaaataaataaatatcaataaataggtaaatataaagaaactaggtatctgataatggctcgacgctaaacctatcaataacataataggaggcataaaataaccaccaatcgttgtaagccattggcctgctagatgtctagattgtgtaattgcgaatccttgttgtaatgtctgttgtcgctctcgtggacttgttacaatgactaaatcttttgcacggccaccagcgagtttattaaacagtacatgaccaaattcatgtgttaaaacagggatatagtttaaaatgacatctaaatagttcaaaataggcttatgtctatattgatgaatagcaatataacaagctgcaacaataacgataatgtatatattaagttgaattgtcgtattaaaaaagtttgataaataattcattgttaacctcatataagatattaatttaaagtttgcttagcacttattataaatgatattggcatcaatagcgttagactttagacttaccttagttaaactaattttaatttttgaaaaggtgaatatgtgttaaaataaagcaaaatcatttcgatataaataggatgaatataaatactgttaatattgattacactaacataataatgaaataagataggagattcctgttatgactgttgaagaaagatccaatacagccaaagttgacattttaggggtcgattttgataatacaacaatgttgcaaatggttgaaaatattaaaaccttttttgcaaatcaatcaacgaataatctttttatagtaacagccaaccctgaaatagtgaattacgcgacgacgcatcaagcgtatttagagttaataaatcaagcgagctatattgttgctgatgggacaggagtagtcaaagcttcgcatcgtttaaagcaacctctagcgcatcgtatacctggtattgagttgatggatgaatgtttgaaaattgctcatgtaaatcatcaaaaagtatttttgctaggggcaactaatgaagttgtagaagcggcacaatatgcattgcaacaaagatatccaaacatatcgtttgcacatcatcacggttatattgatttagaagatgagacagtagtgaaacgaattaaactgtttaaacctgattacatatttgtaggtatgggattccctaaacaagaagaatggattatgacacatgaaaaccaatttgaatctacagtgatgatgggcgtaggtggttctcttgaagtatttgctggggctaaaaagagagcgccttatatctttagaaaattaaacattgaatggatatatagagcattaatagattggaaacgtattggtagattgaagagtattccaatatttatgtataaaatagccaaagcaaaaagaaaaatgaaaaaagcgaaatagtcatgatgataaaaataaaaccgaggaaatccttaaatggagattctcggttttttcggtttatttaataacgaagcgggcctcatcgagtttgtttctaaattctttttgttcggctttggatttctttttaaaatcgttaaggaaagcctcatatttaggtaatacatcatcaagttcaccgtaatcttttaactttccgccttcaatccaagcaatcttagtacaaaattgtctcacttggcctaagttatgactaacgaaaaagatggttttgttttgctctttaaactcgtaaattttatctaaacatttttgtgcaaaagtttggtcacctacagataaagcttcgtcaatgactaagatatctggattaactgtgatattaattgaaaaaccaagttttgcacgcataccacttgaatactttttaactggttgataaataaactcaccaagttcactaaattcaataatcttaggtgtcatcgctttaatttcttttcgcttaaagcccatacataacattttaaattcgatattttcaatccctgtaagttgtccactcaagccagcactaattgcgataacgctgacttcaccattacgatccactttgccaacagtaggcgacaaagaaccgccaatgatattgctcaacgttgatttgccggaaccattgatgccaacaagccctatgacgtcgccttcatatgcttttaaactaatgtcatctaaagcgaaaaatgttttgtttttatgtttgggaatgagcgcatctttcatacgttctttatttgtacgataaatacgatattcttttgttacatttttaatgtttaccgaaacgttcatttgtagaccttccttattcacatttatctagattataatatactactcaacagttgttaaattttaaaacctgttgtaaagtgtatagaagattttgttattatcagagttggtgttttgacacaaaatgttaatcatcaatgataacaatgatatttaaaaactaaacttatttcaacttacatgattgtatactataatgtatttgtaataaactaatattttaaagaactagacaataattttgatagcatccatgtatagtgatagtatttacaacaattattataatactatttagttaagtagagaaatagttaaacatttgaaagtgtggtttaatggaatgtcagcaataggaacagtttttaaagaacatgtaaagaacttttatttaattcaaagactggctcagtttcaagttaaaattatcaatcatagtaactatttaggtgttgcttgggaattaattaatcctgttatgcaaattatggtttactggatggtttttggattaggaataagaagtaatgcaccaattcatggtgtaccttttgtttattggttattggttggtatcagtatgtggttcttcatcaaccaaggtattttagaaggtactaaagcaattacacaaaagtttaatcaagtatcgaaaatgaacttcccgttatcgataataccgacatatattgtgacaagtagattttatggacatttaggcttacttttacttgtgataattgcatgtatgtttactggtatttatccatcaatacatatcattcaattattgatatatgtaccgttttgttttttcttaactgcctcggtgacgttattaacatcaacactcggtgtgttagttagagatacacaaatgttaatgcaagcaatattaagaatattattttacttttcaccaattttgtggctaccaaagaaccatggtatcagtggtttaattcatgaaatgatgaaatataatccagtttactttattgctgaatcataccgtgcagcaattttatatcacgaatggtatttcatggatcattggaaattaatgttatacaatttcggtattgttgccattttctttgcaattggtgcgtacctacacatgaaatatagagatcaatttgcagacttcttgtaatatatttatatgacgaaaccccgctaaccattaataaatggaagtggggttcatttttgtttataatttaagtaaataacatattaagttggtgtattatgaacgttttaataaagaaattttatcatttggtagttcgaatactttctaaaatgattacgcctcaagtgattgataaaccgcatatcgtatttatgatgacttttccagaagatattaagcctatcatcaaagcattaaataattcgtcgtatcagaaaactgttttaacaacaccaaaacaagcgccttatttatctgatcttagcgacgatgttgatgtgatagaaatgactaatcgaacattggtaaaacaaattaaggctttgaaaagcgcgcagatgattattatcgataattattacctattactaggtggatataataagacttctaatcaacacattgttcaaacgtggcatgcaagtggtgcattaaaaaactttggcttaacagatcatcaagtcgatgtgtctgacaaggcaatggttcagcagtaccgtaaagtttatcaagcgacggatttttacttagtgggttgtgaacaaatgtcacaatgttttaaacagtctttaggtgcaacagaagagcaaatgctgtattttgggcttccgagaattaataaatattacacagctgatagagcaacggttaaggcagagttaaaggataaatatggaattacaaataagttggtattatatgtaccaacatatagagaagataaagcagataatagggctattgataaagcttattttgaaaaatgtttaccaggatatacactgattaataaattacatccatcaattgaagattcagacattgatgacgtatcttcaatcgacacgtctacattaatgctaatgtcagatataattattagcgactatagttcgctgccaatagaagctagcttgttagatattccaactatattttatgtgtatgatgaaggaacatatgataaagtgagaggcctgaatcaattttacaaagcaataccggatagctacaaagtgtatactgaagaagatttaataatgacgatacaagaaaaagaacatctattaaatccgttatttaaagattggcataagtataatactgataaaagtttacatcagctcacagaatatatagataagatggtgacaaaatgaggcttacgataatcatacctacatgtaataatgaggcaacaattcgacaattgttaatatctattgagagtaaagaacactatagaatcctttgtattgatggtggttctactgatcaaacaattcctatgattgaacgcttacaaagagaactcaagcatatttcattaatacaattacaaaatgcttcgatagctacgtgtattaataaaggtttgatggatatcaaaatgacagatccacatgatagtgacgcatttatggtcataaatccaacatcaatcgtattgccaggtaaattagataggttaactgcagctttcaaaaataatgataatattgatatggtaatagggcagcgagcttacaattaccatggtgaatggaaattgaaaagtgctgatgagtttattaaagataatcgaatcgttacattaacggaacaaccagatttgttatcaatgatgtcttttgacggaaagttattcagtgctaaatttgctgaattacagtgtgacgaaactttagctaacacatacaatcacgcaatacttgtcaaggcgatgcaaaaagctacggatatacatttagtttcacagatgattgtcggagataacgatatagatacacatgctacaagtaacgatgaagattttaatagatatatcatagaaattatgaaaataagacaacgagtcatggaaatgttactattacctgaacaaaggctattatatagtgatatggttgatcgtattttattcaataattcattaaaatattatatgaatgaacacccagcagtaacgcacacgacaattcaactcgtaaaagactatattatgtctatgcagcattctgattatgtatcgcaaaacatgtttgacattataaatacagttgaatttattggtgagaattgggatagagaaatatacgaattgtggcgacaaacattaattcaagtgggcattaataggccgacttataaaagattcttgatacaacttaaagggagaaagtttgcacatcgaacaaaatcaatgttaaaacgataacgtgtacattgatgaccataaactgcaatcctatgatgtgacaatatgaggaggataacttaatgaaacgtgtaataacatatggcacatatgacttacttcactatggtcatatcgaattgcttcgtcgtgcaagagagatgggcgattatttaatagtagcattatcaacagatgaatttaatcaaattaaacataaaaaatcttattatgattatgaacaacgaaaaatgatgcttgaatcaatacgctatgtcgatttagtcattccagaaaagggctggggacaaaaagaagacgatgtcgaaaaatttgatgtagatgtttttgttatgggacatgactgggaaggtgaattcgacttcttaaaggataaatgtgaagtcatttatttaaaacgtacagaaggcatttcgacgactaaaatcaaacaagaattatatggtaaagatgctaaataaattatatagaactatcgatactaaacgataaattaatgtaggttattataaaataaatataaaacggacaagtttcgcagctttataatgtgcaacttgtccgtttttagtatgttttattttctttttctaaataaacgattgataatcatatgaacaataagtgctaatccagcgacaaggcatgcaccaccaatgatagtgaataatggatgttcttcccacatacttttagcaacagtatttgccttttgaataattggcttatgaacttctacagttggaggtccataatctttattaataaattctcttggatagtccgcgtgtactttaccatcttcgactacaagtttataatcttttttactaaaatcacttggtaaaacatcgtaaagatcattttcaacataatatttcttaccatttatcctttgctcacctttagacaatatttttacatatttatactgatcaaatgaacgttccattaatgcattccccatcatattacgttgcttctcgccaccaaggtttttatagtctcctgcacccatgataacttgattaattctaaatttacctcgtttggtagtaatcgtatggttgtaatttgctgtatcacttgatccagtttttaaaccatctgtacccggcaaactcatttttgcaccttccaatgaaaagttgaatgtgtaatacgtaactgcatgcgttgttggtgctaactgctttgtaaagtctaatattttaggtgtctctttaatcacgtgtaaatctaaaatggcatagtctctagcagtcgttacagtacgttcttggtctttatactttgttggtgcaaatgaacgtaatcttgaattttcagcacccgttggattgacgaaatgtgtatttttcattccgatagctttagctttgttattcattaaatcaacgaaatcgctggtgttttttgataccttcttagctaaaattaatgccgcggcattactagaattagatactgtaatttgtaataggtctgcgattgtccatacttgtccaggatatagtttcgtattactcaactcaggtagtgtagacataatatattctttgttcgtcattgtgacagtgtcatcaagtgaaagctgccccttatttacagcttccaatgttaagtacattgtcattaatttagtcatagacgctggattccacttagtatcgatattgtattgatacagtaattgtccagtttgacttacattaacagcactcgtcggttcgtatgcagccgacaaacctgcataaccatattgatttgctgcttgtacaggggttacgtcactgttagcagcttgtgcatatggtgtcataatacttaatgttaaacataaaatgatgataatagatattaaatttttcataaagcgttaatcttcccttttccaattcttaaatattccctaaaagcaatggtcattcctacttacggaaatcattgctaattcacttcaccttaattaaattgttgaaaataaagttttctgcagttaatttgaaaaataatgcaaatatattacgtgcgtagctaaaggtgttataatgtttgtacgaagagcaaacttactcaaaagcgattaattttcatgttttaatataaagactttgagaagttattacaaaaaatgcaatagaaatattctatcatataaatgttatgagcggtattttggggcaacactttatttgatttttaaagttttgttgggagaaagtatatgatagaaatgcatgtatctatctaaatgaattaactataaatttcaaacagaagaggtaaaactatgaaacgagaaaatccattgtttttcttatttaaaaaactatcatggccagtgggtcttatcgttgcagctatcactatttcatcactagggagcttaagtggactattagtgccactgtttactggacgaattgtagataaattttccgtgagccatatcaattggaatctaatcgcattatttggtggtatctttgttatcaatgctttattaagcggattaggtttatatttattaagtaaaattggtgaaaagattatttatgcgatacgctcagttttatgggagcatatcatacaattaaaaatgccattctttgacaaaaatgaaagtggtcaattaatgagtcgattaactgacgatacgaaagtgataaatgaatttatttcacaaaagctacctaacttattaccatcaatcgttacattagttgggtcactaatcatgttatttattttagattggaaaatgacattattaacatttataacgataccgatattcgttttaattatgattcctctaggtcgtattatgcaaaagatatcgacaagtacacaatctgaaattgcaaacttcagtggtttgttagggcgtgtcctaactgaaatgcgtcttgttaaaatatcaaatacagagcgtcttgaattagataatgcacataaaaatttgaatgaaatatataaattaggtttaaaacaggctaaaattgcggcagttgtacaaccaatttcaggtatagttatgttgctaacaattgcaattattttaggttttggtgcattagaaattgcgactggtgcaatcactgcaggtacattaattgcaatgatattttatgttattcagttatctatgcctttaatcaatctttcaacgttagttacagattataaaaaggcagtcggtgcaagtagtagaatatacgaaatcatgcaagaacctattgaaccgacagaagctcttgaagattctgaaaatgtattaattgatgacggtgtattgtcatttgaacatgtagactttaaatatgatgtgaagaaaatattagatgatgtgtcgttccaaatcccacaaggtcaagtgagtgcttttgtaggtccttctgggtctggtaaaagtacgatatttaatctgatagaacgtatgtatgaaattgagtcaggtgatattaaatatggccttgaaagtgtctataatatcccgttatctaagtggcgacgcaaaattggatatgttatgcaatcaaattcgatgatgagtggtacaattagagacaatattttatacggaattaatcgtcatgtttcagatgaagaacttattaattatgctaaattagcgaactgtcatgattttatcatgcaatttgatgaaggatatgacacgcttgtaggtgaacgaggattgaaactgtctggcggacaacgtcaacgtattgatattgctagaagttttgttaaaaatcctgatattttgttacttgatgaagcaacagctaatctcgatagtgaaagtgaattgaaaattcaagaagctttagaaacattgatggaaggtagaacaacgattgtcattgcgcatcgtttgtctacgattaaaaaagccggtcaaattatattcttagacaaaggacaggtaacaggtaaaggtacgcattcagaactgatggcatcacatgcgaagtataaaaactttgtagtgtctcaaaaattaacagattaattttatatataagtaagcttggagcaaatacacatataccatcgaggaaattaaagtgtggcacattgatggatatagatgttaataaattgcttcaagcttttgtctatttttaatcatttgagaagttacgacataataattcttaaattaatgaaatcgatattttaagaaaaaaatgctcatggtataatacaagttataagcaaacatacatatattaaatactgtagccacgagtcataattcttcatattttacatagcaatttaactgattttagagtccacggtacagaagtttgatatttcaatgtttctaaatttttaaaaaattaaatcataggtgggtgccaaatgtttttattaatcaacattattggtctaattgtatttcttggtattgcggtattattttcaagagatcgcaaaaatatccaatggcaatcaattgggatcttagttgttttaaacctgtttttagcatggttctttatttattttgattggggtcaaaaagcagtaagaggagcagccaatggtatcgcttgggtagttcagtcagcgcatgctggtacaggttttgcatttgcaagtttgacaaatgttaaaatgatggatatggctgttgcagccttattcccaatattattaatagtgccattatttgatatcttaatgtactttaatattttaccgaaaattattggaggtattggttggttactagccaaagtaacaagacaacctaaattcgagtcattctttgggatagaaatgatgttcttaggaaatactgaagcattagccgtatcaagtgagcaactaaaacgtatgaatgaaatgcgtgtattaacaatcgcaatgatgtcaatgagctctgtatcgggagctattgtaggtgcgtatgtacaaatggtaccaggagaactggtactaacggcaattccactaaatatcgttaacgcgattattgtgtcatgcttgttgaatccagtaagtgttgaagagaaagaagatattatttacagtcttaaaaacaatgaagttgaacgtcaaccattcttctcattccttggagattctgtattagcagcaggtaaattagtattaatcatcatcgcatttgttattagttttgtagcgttagctgatctatttgatcgttttatcaatttgattacaggattgatagcaggatggataggcataaaaggtagtttcggtttaaaccaaattttaggtgtgtttatgtatccatttgcgctattactcggtttaccttatgatgaagcgtggttggtagcacaacaaatggctaagaaaattgttacaaatgaatttgttgttatgggtgaaatttctaaagatattgcatcttatacaccacaccatcgtgcggttattacaacattcttaatttcatttgcaaacttctcaacgattggtatgattatcggtacattgaaaggcattgttgataaaaagacatcagactttgtatctaaatatgtacctatgatgctattatcaggtatcctagtttcattattaactgcagctttcgttggtttatttgcatggtaatatgtcgaagagtgactatgataatacattttaactaataaatatgtccaggtatgtcgtctattgatataggtgagatgcttggacttttttattattgatataaaggtatttaaatatttttaaagttaccgaaattgaagcattataaaaaccaagtgcacatggtaatacacttggcttttatgggaaatgaatattattgtacatatgacagtaaggactaggtacagtcatagtacttcgagcaaaatttgttttgttattataaacaacacaaaggagataacttctctattgaagaagttaaaaacattatagcagacaatgaaatgaaagtaaattaaaaattcagaatatttttaattattatattgtgagtgatatttaatagggaaagctattcttcatataaattagttaaatagtaaatctttgttagaactctttccatagagttgtgacagcatttttgttgtgctactatttttatagtctaataaatatataaaggggatggtttcgtgaataaaacggttaaagatttaatactagttgtcttaggttcatttatctttgctgcaggtgtaaatgcatttattatttctggtaacttaggtgaaggcggggttacaggtttagcaattattttatattatgcgtttcatatttcaccagccatcactaacttcttggtcaacgcagtattgattgccataggttataaatttttgagtaagagaagtatgtacttaactattcttgtaacaattcttatttcaatatttttgagtttaacagaatcatggcaagtagaaactggaaacagcattgtgaatgccatttttggtggtgtaagcgttggactaggaatcggagtaattatccttgcaggcggtacaacagcaggtacaacaattttggcgagaattgcaacgaaatacctcgatgtaagcacgccatatgctttgcttttcttcgatatgatcgttgttgcaatttcacttacagttattccacttgataaagtattagtaacagtaatatcactttatataggaacaaaagtgatggaatatgtcatagaaggtttaaacactaaaaaagctatgacgattatttcaactaatcccgacaaacttgccaaagcaatagacgagcaaattggaagaggtttaaccattttaaacggacatggctattatacgcgtgaagaaaaagatgtcttatacgttgttatttctaaaacacaagtttcaaaagcaaagcgattaattaaacaaatcgataaagatgcattcctcgtaattcatgatgtaagagatgtctatggtaatggctttcttgcagatgaataaataaatggtatgagcacacatacttaaatagaagtccacggacaagtttttgaactatgaagacttatctgtgggcgttttttattttataaaagtaatatacaagacatgacaaatcgagttatccaatttaaaaagtaatgttagtcaataagattgaaaaatgttataatgatgttcatgataatcattatcaattgggatgcctttgaaaattgataatttaaaaatagaaattattttttataaacagaaagaattttattgaaagtagggaaattatgaatcgtttgcatggacaacaagttaaaattggttacggggataacacgattataaataaattagatgttgaaataccagatggcaaagtgacgtcaatcattggtcctaacggctgcgggaaatctactttgctaaaggcattgtcacgtttattggcagttaaagaaggcgaagtatttttagatggtgaaaatattcatacacaatctacgaaagagattgcaaaaaaaatagccattttacctcaatcacctgaagtagcagatggcttaactgttggggaattagtttcatatggtcgttttccacatcaaaaaggatttggtagattaactgctgaggataagaaagaaattgattgggcaatggaagttacaggaactgatacattccgacaccgttcaatcaatgatttaagtggtggtcaaagacaacgtgtttggattgcaatggcattagcacaaagaactgatattatctttttagacgaaccaacaacatatttagatatctgtcatcaattagaaatactagaattagttcagaagctaaatcaggaacaaggttgtacaattgtcatggttcttcatgatatcaaccaagcgattcgtttctcagatcatcttattgcgatgaaagaaggggatatcatcgctacaggttcaacagaagacgtattaacacaggaaatattagaaaaagtttttaatattgatgttgttttaagtaaagatcctaaaactggaaaacctttactggtaacttatgacttatgtcgcagagcttattcttaattaagtaagttaatatgataaaaaggacaattaacatgacaaatagagagaacccaacgccattgaagtttttatcctatattataggtttaagtatgatactactaatcacactatttatttctacattaataggtgacgccaaaattcaagcctctacaattatagaggctatttttaattataatcctagcaatcaacagcaaaacatcatcaatgagattaggattcccagaaatatagcagcagtaattgtaggtatggcgcttgcagtttctggtgcgattatacaaggtgttactcgtaatggtcttgctgatccggcgctcataggtttaaattcaggtgcttcatttgctttagcattaacatatgcagttttaccaaacacttcatttttaatattgatgtttgctggatttttaggtgctattctaggaggagctattgtattaatgataggccgatctagacgtgatggatttaatccgatgcgtattattttagcgggtgcagcagtaagtgctatgttaacagcgctaagtcaaggtattgcattagcttttagactaaatcaaacagtaacattttggactgctggaggcgtttcaggcacaacatggtcacaccttaagtgggcaattccattaattggtattgcgttattcattatattaacaattagtaaacaacttaccattttaaatcttggtgaatcattagctaaaggtttaggtcaaaatgtaacaatgatcagaggcatatgtttaattattgctatgattctagcaggtattgcagttgctatcgctggacaagttgcatttgtaggtttgatggtgcctcatatagtaagatttttaattggaactgattatgctaaaattctaccattaacagccttgttaggtgggatactcgtgcttgttgccgatatgatagcacgatatttaggagaagcgcctgttggtgcaatcatttcatttatcggtgttccttactttttatatttagttaaaaaaggaggacgcacaatatgattagttcaaataataaacgcagacaatggatagcactggctgtttttagcattctactatttctaggttgtacttggagtattacctcaggtgaatacaacatacctgttgaaagatttttcaaaactttaattggacaaggtgatgccattgatgagttaatcttattagatttcaggttacctcggatgatgattactattttggctggcgcagcgcttagtattagtggtgcaatagtgcaaagtgtcacaaaaaatccaatagctgaaccaggtatattaggtattaacgcaggtggcggatttgcaatcgcattatttattgcaattggtaaaattaatgctgacaactttgtttatgtactgccgttaataagtatactaggtggtatcaccactgcattgattatttttattttcagttttaataaaaatgaaggtgttacacctgcgagtatggtattaataggtgtaggtttacaaacagcattatatggtggctcaattacaattatgtcaaaatttgatgataagcaatctgatttcatcgctgcttggtttgcaggtaatatttggggtgacgaatggccatttgtcattgcatttttaccgtgggtgttgattattattccttacttactatttaaatcgaatacactaaatattattcatacgggtgataatattgcacgaggtctaggtgtaaggttaagcagagaacgtttaatattattctttatcgcagtgatgttatcatctgctgctgtagcagtagcaggttcaatttcgtttatcggattaatgggtccgcatattgccaaacgtatcgttggaccacgtcaccagttgtttttaccaattgccattttagtaggggcatgtttacttgttatagctgatacaattggcaaaattgtattacaaccaggtggggttccagcaggtattgtcgtagcaattattggtgcaccgtatttcttatatttaatgtacaaaacgaaaaatgtatagtgtcaaaggacacaacttattgctatgaaaggcactttattataaggcttttcatagcattttttatttaatgagccactcaagactatttattttttcaataatgaaccattaagttatcaagaggatcttatcaaaaatatatttgataacggtatcaggttaatcctttatgatagcgcattcatttattctgttttatactatgactgataataccaaggaggtacaacatgatgaaaaagttaatcaataaaaaagaaacatttttaactgatatgcttgaaggattgttaattgcgcacccagagttagatctgattgctaatacagttattgtaaaaaaagctaagaaagaacatggtgtagcaatagtctctggaggtggaagcggtcatgaacctgcgcatgccggttttgttgcagaaggtatgctagatgcagcggtttgtggcgaagtatttacatcacctacaccagataaaatattagaagctattaaagcagtagatactggtgatggtgtattactagttgtaaaaaactatgcaggtgacgtgatgaatttcgaaatggcacaagagcttgcagaaatggaaggtataaatgttcaaactgttattgttcgtgacgacattgctgtgacaaacgaagcacaacgtcgtggtgttgcaggaacagtgtttgttcataagcttgctggttatcttgctgaaaaaggttattcattaacagagataaaatcgcgtgtagaagcgttgttacctgaaattaaaagtattggtatggcaattgagccaccgcttgttccaactactggaaaatatggctttgatattgaagacgacaaaatggaaatcggtattggtatacatggtgaaaaaggtattcatagggaagaaataaaggatattgatcatattgttggaacattgttagacgaattgtataaagaagttactgccaatgatgtcatattaatggtaaatggtatgggtggtacgccgttatctgaattaaatatcgtaactaaatatattcaacaaaatttagctgcaagaacggtcaatgttgctaaatggtttgttggtgattatatgacatctttagacatgcaaggtttttctataactatcgtgcctaataaaccagaatatttggaagcatttttagcaccaacaacaagtcaatactttaaataagaagtgaatatgaataaatatacatttatgaggtggcacaaatgaaagtgaatgatatgaaagcacgtttattaaatttagaagaaacgtttaaaaaacatgaatctgaattaactgaattagatcgagcaattggtgatggtgaccacggggttaacatggttcgtgggtttagtagtcttaaagacaaacttgatgatagctcaatgcaatcattgttcaaatcgactggtatggcattgatgtcaaatgttgggggtgcatcaggaccactgtatggctttagctttgttaaaatgtctgcagtcaccaaagatgatatggataatcaagatttcattacactaattcaggcatttgccgaagcggttgaatcacgtggtaaagttactttaaatgaaaagacaatgtatgatgtagtagcgcgagcagcagagaagcttgaaaatggtgaaactttaacattcaatgatttacagcaattagcagataatacaaaagatatggtagcaacgaaaggtagagctgcatattttggagaagaatcaaaaggttatattgatccaggtgctcaaagtatggtttatattttaaacgctttgattggagatgaagataatgcctaaaattatacttgttagccacagtaaagaaattgcaagtggtacaaaatctttgttaaagcaaatggcaggtgacgttgatattataccaatcgggggattaccagatggttcaattggaacttcatttgatatcatccaagaagttttgactaaattagaggatgatgcattgtgtttttacgatattggatcttcagaaatgaatgtagatatggcaattgaaatgtatgatggtaatcatcgtgtgttaaaagttgatgcaccaattgttgaaggcagttttatcgcagcagtaaagctatcaatcggcggttcaattgatgatgcattagcagaaatcaaacaatcattttagttaaaatttactaataatgaaaaatgtaaacctttttcaaatgaaactttataaaaaatatgatagtatatatgtaaatgtttaataaaatctggagaaataggaggacattgccatgcaacaccttataaaaaaacatgtattgaatggcgagtttgatttagtacgacaattgatgtccgaaacagattttatggaatttgaagaagcatatatttcaagtgcgcatgaagtagaaagtatgatgttttatacatgtattttagatatgattaagtacgaagaatcatctgaaatgcatgacttagcatttttattgcttgtgtatccactaagtgaatatgaaggtgctttggattctgcttattatcatgcagacgcttccataaaacttactgacggcaaagaagttaaaagtttgttacaaatgttattattgcatgcgataccaacacctgttatttcagataagaaggcttttgatatcgccaagcaaattttaaaattagatcctaataataatgttgctcgtaacgtcttaaaagacactgccaaacgtatggacaacgttgttgttgatataaatgaattacaccaacgtaatgcacgttaattacatttcaattatattagcttaataatagttttaacatttggttgggttgggacatatgttccagccttttttaatacttaaaaactaacgaagtatacttgtgtgcacaaatggtttttatacaacattttataaatttatacattttaataaagaacatacgatagatggtttaaaccttgttaactgagaaattttgatatgtattcttcgaaatttaactaaatatacgaaattcaagaagcacaataattaatcatttttcctatacaaaagttcgtatgactgcattataaaagcataaatttataatttttttaaatgtcattgaacgtgataatgtgaatggattgagcaattttgaaaaagtgaaaaataacctatgcgacttgcaattaattttcagtacgttataatgcacactgtgcaaaattaaggaggtctattattcacatgatgatgaataaagaagcaacaaaaattggatttgcctacgtcggcattgtagtgggcgcaggattttcaactggacaagaagttatgcaatttttcactaaatatggcttgtgggcttatttaggcgttattatatctggttttattttagcttttattgggcgccaagtagcaaaaattggtactgcctttgaagcgacaaatcatgaatcaacattacaatacgtattcggtgaaaagtttagtaaagtctttgattatattttaatcttcttcttatttggtatagctgtaaccatgatagctggtgcaggcgcaacatttgaagaaagttataacatacctacatggctaggtgctttaattatgacattagcgatttatattacgttgctattagactttaataaaatagtacgtgcactaggtatcgttacaccatttttaattgttttagttgtattaatcgctggcgtttatttatttaaaggtcatgtttcattagcagaagttaaccaagtagtgcctgaggcaagtatttggaagggaatctggtttggtacaatatatggtggattagctttttctgtaggttttagtaccatcgtagcaatcggtggggatacagaaaagcgtacagtgtcaggtgcaggcgcgatgtatggtggtattatctatactgtattactagcattgatcaactttgcattgcaaagtgaatatccaactattaaaaatgcctcaattccaacattgacgttagcaaataatatccatcctttaatagcaacagtgttatctgttattatgctggcggttatgtataatactattctaggactaatgtattcatttgcagcacgttttacagaaccatacagtaaaaattatcatatctttattattataatgatggtagcaggttatttattaagtttcgtaggatttgctgaattaattaataagttatatacaattatgggatatgtaggcttatttatcgtagtagctgtaattattaaatatttcaaacgtaaaaatgcggataaaaaacatattgcttaatatcatatgatggatatccgaaactttacaattgaatcactttgttttaaccttaaaagcaattcgtctctactcttatcgggcgaattgctttttatatttattcagtctattaatatgagcgtctaacaaatagagaggtacgatgtaatgaataaagataataaatggacgatgataactgcactttttataactgtaatcagtgtattgttagcatttcatctgaaacaacattatgaccaaattacaaatgagaaccatgctaataaagacaaaattaatattaaaaataaaaatgtgcgcatttatcaaaaccttacatacaatagagttttccctaacagtaaattagatattattacacctgttgatatgtcttctaatgccaaactgccagttattttttggatgcacggtggtggttatattgcgggtgataagcagtataaaaacccattattagcgaaaattgctgaacaagggtacattgttgtgaatgtaaattatgcattggcgccacaatataaatatcccacaccattaattcaaatgaatcaagcaactcaattcattaaagaaaataaaatgaatttacctattgattttaatcaagtaattattggcggtgattctgcaggtgctcaattagctagccaatttacggcaatacagacgaatgatcgcttaagagaagccatgaaatttgatcagtcattcaaaccatcacaaattaaaggcgctatactatttggtggtttttataatatgcaaacagttagagaaactgagtttccaagaatacagttatttatgaaaagttatactggcgaagaagattgggaaaagagctttaaaaatatttcacaaatgtctacagtaaaacaatcgacaaaaaattatccaccaacatttttatctgttggagatagcgatccattcgaaagtcaaaatatagaattcagtaagaaattacaagaattgaatgtaccagtagatactttgttttatgatggtacgcatcatttacatcatcagtatcaatttcaccttaataaacctgaatcgatagataatatcaaaaaagtgttacttttcttaagtcgtaatacatcttctagtggtattcaaactgaagagaaaccacaaatagaaaatccgagtaatgaattaccgttaaatcctttaaactaatgataaacagtagtaatttattacttaagcaacatttaagatcttcaaattgaaaacgaagaatttaaaacatgtggggctaatgtgtaagagtctgagatataataaattgttagcggttctttatcatttctatctcaccctattatgatgtgacatttattttacaaactaatttgttttgaacctgaaaataactttttacaactaaattgtcgaaaaacagtgtgtacatgatataataaatttataaattgaaaagaattcaaaagaaaaaataaaatatagattgagcacgaagtgatttgaaataaggttgtgaaagggaatgacaaggtcagcattaaaaccatttaaaaataaacgcgttatggttactggacgtatacaacgtgttttgtttaaaaattatttagatagacatagcacatttaagccgaatgtaaggatattattaaaagatgtatttgtttcaggtgtatcaatagatcatttatggttatatgagacaaataaatactatgcattggcaatggaacttattcatcaacgagtaaaatttagtgcgaatgttgtaccatattacaaaataaatagaaataataatttattcgtacaagattatggaattaagcgtaaaggtaggttaattactgaagaagcttacaatcaaaacaatcagtatcaggataagatatatgaaaaattaccggatatagattttagactcgaagatttttatagtaaggaaaactaaacaacatatataaagcaccactaatcgtagttgatagttgatcaattacacattagtggtgctttattttgaatttaaatttgataaatgaataagagtatacgcattcatttaagattagatgacattgataagtatgagtaatgtattaggtaaccattaaattcgttgttatgcgattctgatacaagattatgataaaatagctttaattaagaattttagccatcatatagtcatcgtaatatttaccatcgataaataacttatcttttaaaacgccttcgatttgaaaatcggcacttttaaaaagctcgagggcaggttggttattgagtggtacatttgcttcaattcggtgtatttgattgtttaaacaccaagccataatggcatcaagaagtgcttggccaattccacgatgttgatataatttctttacacctaaatcaattttagcaacatgtttaatgcgttgaaatggtgtcgtattaacaaaggcaaagccaacgagttgttcatcactttcagcaacaaagatgactttatgtggagaagtgatatattcttctaattgtttactagccgatgtgacgctaggatcatattctcctggtgtgtagaacatatacggagattcgtcgtatattttcgctaacattgaaatgaaattttctacatctttgatactaactctacgtataatatgggccataaaaagcctccagtattttgaaattttaaaacatttgctactattataatatatatgtaactaaaaggtggagtaatatgttttttggttacagtttaaaggagtattttagatgaaacctaaagttttattagcaggtggaacaggatatattggtaagtatttaagtgaagtgattgaaaatgatgctgaactttttactatatcaaaatatccagacaataaaaaaacagatgatgttgaaatgacttggattcagtgtgatatatttcattacgaacaggttgttgcagcaatgaatcaaatagatattgctgtattctttatcgacccaacaaagaattctgccaaaataacacaatcatcagcaagagatttaacattaatcgcagcagataattttggtcgagcagcggctatcaatcaagtaaaaaaagtaatctacatacctgggagtcgttatgataatgaaacaattgaacgcctaggtgcatatggtacacctgtagaaacaacaaatttagtttttaaacgttctttagttaatgtagaattacaagtttcaaagtatgatgatgttagatcaacgatgaaggtagttttaccaaagggatggacattaaagaacgttgtaaaccattttattgcatggatgggttacactaaaggaacttttgtgaaaacagaaaaatcacatgatcaatttaagatatatattaagaataaggtgcgaccgctcgcagtatttaaaatagaggaaacagctgacggaataataactttaattttattgagtggaagtttagtgaaaaaatatacagttaatcaagggaagttagaatttagattaatcaaagagtcggcagtcgtttatatacatctatacgattatatccctcgattattttggccgatttattactttatacaagcaccaatgcaaaaaatgatgattcatggctttgaagttgactgccggattaaagattttcaaagtcgattaaaatcaggagaaaatatgaaatatactaaataatattgggtgatatggatgcaaatactactagtagaagatgacaatactttgtttcaagaattgaaaaaagaattagaacaatgggattttaatgttgctggtattgaagattttggcaaagtaatggatacatttgaaagttttaatcctgaaattgttatattggatgttcaattacctaaatatgatgggttttattggtgcagaaaaatgagagaagtttccaacgtaccaatattatttttatcatctcgtgataatccaatggatcaagtgatgagtatggaacttggcgcagatgattatatgcaaaagcctttttatacaaatgtattaattgctaaattacaagcgatttatcgtcgtgtctatgagtttacagctgaagaaaaacgtacattgacttggcaagatgctgtcgttgatctatcaaaagatagtatacaaaaaggtgacgatacgatttttctatccaaaacagaaatgattatattagaaattcttattacaaaaaaaaatcaaatcgtttcgagagatacaattatcactgcattatgggatgatgaagcatttgttagtgataatacgttaacagtaaatgtgaatcgtttacgaaaaaaattatctgaaattagtatggatagtgcaatcgaaacaaaagtaggaaaaggatatatggctcatgaataatttgaaatgggtagcttattttttgaaatctcgcatgaactggatattttggatattgtttttaaacttgcttatgttaggcattagtctaatcgattatgattttccaatagacagtttattttatattgtttctttgaatttaagtttaacaatgatttttcttatattgacatattttaaagaagtaaaattatataagcattttgacaaagataaagaaatagaagaaattaaacataaagatttagcggaaacgccatttcaacgtcatacagttgattatttatatcgtcaaatctcagcgcacaaagaaaaggttgttgagcaacagttacaattgaacatgcatgaacaaaccattacagaatttgtgcacgacataaaaacacctgtgacagccatgaaattattaattgatcaagaaaaaaatcaagaaagaaaacaggcattactatatgaatggtctcgtataaactcgatgctggatacacagctgtatattactagattagaatctcaacgcaaagatatgtattttgattacgtgtcacttaaacgcatggtcattgacgaaatacaattaacaagacatattagtcaggttaaaggtattggttttgatgttgactttaaagtggatgattatgtttatacagatataaaatggtgccgtatgattattagacagattttgtcaaacgcattgaaatatagtgagaattttaatattgaaattgggacagaattaaatgatcaacatgtttcgttatatattaaagactatggcagaggtattagtaaaaaagatatgccgcgaatatttgaacgaggatttacgtcaacggctaacagaaatgaaacgacgtcttcaggtatgggtctatatttagtaaatagtgtaaaggatcaattaggtattcacctgcaagtcacgtcgactgttggtaaggggacaactgtcagattgattttcccattacaaaatgaaattgttgaacgcatgtcggaagtgacaaatttgtcattttaaacatgcgttttgttacttagaattgatacatcaatacagcttcaacgttataataagatagatgttagtcatatgttaaattgaagatacaagtgccaaagcctaaaggaaatgaagttaagataaattataggagtgttaaagtggcaattttagaagtaaaacaattaacaaaaatatatggaactaaaaaaatggcacaagaagtgttgcgagatatcaatatgtctattgaagaaggcgagtttattgctattatgggtccctctggatctgggaaaacgacattattaaatgttttaagttcaattgattatatttcacaaggttctattacattaaaaggaaaaaaattagaaaagctttcaaacaaggaattatctgatatacgcaagcatgatattgggtttatttttcaagagtataatttactgcatacattgactgttaaagaaaacataatgttaccactaacggttcagaagttagataaagaacatatgttaaatcgttatgaaaaagtagcagaagcattaaatatattggatattagtgataaatacccttctgaattgtctggtggacaaagacaacgaacatctgctgcaagagcgtttattacattaccttctattatatttgctgacgaaccaacaggtgcactggattctaaaagtactcaagatttattaaaacgattaacaagaatgaatgaagcatttaagtctacaattattatggtaacgcatgatcctgttgcagcaagttatgccaatcgagtagtgatgctaaaagatggtcaaattttcactgaattataccaaggggatgacgataaacatacctttttcaaagaaataatacgtgtacaaagtgttttaggtggcgttaattatgacctttaacgagataatatttaaaaattttcgtcaaaatttatcacattatgccatctatcttttttcattaattacgagtgtagtattgtattttagctttgtagcattaaaatacgcgcataaactaaacatgacagagtcatatccaattattaaggaaggctcacaagtcggaagctactttctatttttcatcataattgcatttttgttatatgccaatgtgttatttattaaacgacgaagttatgagcttgcattatatcaaacattaggtttatctaaattcaacattatttatatactaatgctcgaacaattactaatatttataattacggcaatattaggtattattattggtatttttggttcaaaactgttattaatgattgtctttacattattaggaattaaagaaaaggttccaattatttttagtttgagggcggtatttgaaacattaatgttaatcggtgtcgcttattttttaacctctgctcaaaattttatattagtgttcaaacaatctatttcacagatgtcaaagaataaccaggttaaagaaacaaatcataataaaattacatttgaagaggttgttttaggcatcttaggtatagtattgattaccacaggatactatctatctttgaacattgttcaatattatgattctatcggtatacttatgtttattttattgtcaactgtgattggggcatacttattttttaaaagctctgtttctctagtttttaaaatggtgaagaagtttagaaaaggtgttataagtgtaaatgatgtcatgttctcatcatctattatgtatcgtattaagaaaaatgctttttcacttacggtcatggcaatcatttcagcgattactgtttcagttctttgctttgctgctataagtagagcgtccttatcaagtgaaataaaatatactgcaccacacgacgttacaattaaagaccaacaaaaagctaatcagttagcaagtgaattaaacaatcaaaaaattcctcatttttataattataaagaagtaattcatacgaaattgtataaagataatttatttgatgtaaaagcgaaagaaccatacaatgtaacaattactagtgataaatacatccctaatactgatttgaaacgtgggcaagctgatttatttgtagcggaaggttctatcaaagatttagtgaaacataagaagcatggtaaggcaattataggaacgaaaaaacatcatgttaatattaagttacgtaaagatattaataaaatctattttatgacagatgttgatttaggtggaccaacgtttgtcttaaatgacaaagactatcaagaaataagaaagtatacaaaggcaaagcatatcgtctctcaatttggattcgatttgaaacataaaaaagatgctttagcattagaaaaagcgaaaaataaagttgataaatctattgaaacaagaagtgaagcgataagctcaatatcaagtttaaccggaatattattatttgtaacatcatttttaggtattacattcttgattgctgtatgttgcattatatacataaagcaaatagatgaaaccgaagatgagttagagaattatagtattttgagaaagcttggatttacacaaaaagatatggcaaggggactaaagtttaaaattatgtttaattttgggttacctttagttattgcactatcacatgcatattttacatcattagcatatatgaaattaatgggtacaacgaatcaaataccggttttcatagtaatgggattatacatttgtatgtatgctgtttttgcagtgacggcttataatcattccaagcgaacaattagacattccatataaaatatacagatggctttcagtagaatagtggattcggattcacgaactatactggaagctttttattataaatgaagagaagttatatttttagcatgtatagttgaatactgggttaaaataccatattaataatgaagtaaaggtatgagtgattatgaaagtgttttgaatgaaatatatttaattggtgatgcttttaattgaaaagattaacaggattcaactttgtaaattgtattaaatgtgagaaaataaaagtatattcattgagagatatatgagtcaatgatcgttttaaacaagataagtgtattttaatatgtaaaagttatgtaataaatattgtatcgttgcaaatttcccaactatatccatttacaatttttagagttgtatagataaaaaattgcctatacaataactttttcaaaacaaatgcctactactatttaaattttatgtaaaagttaagtttcggaattgttaaaaatttgtaaattgaattgtgggattgtaaattttgtgctattttcatataagggcaaatacagtaaattgtttactgtgaggcatttttgaaattaatatcagtacactaaaattatactgacgattgataataacaaatttgtatcattagtttgtaaattcacttgtcttaatttgaaacaaattataactgaatgtgattggtgacaatcgcttaaatggaggattttaaatgtttagtaagaaaaaagataagtttatggttcaattagaagagatggttttcaatctggatcgtgctgctattgaattcggtaaaatggatttcaatacacatttagatttaaaagcatactcagacaacattaaaacttatgagtcacatggtgacgaattagtacatcaagtaattactgatttaaatcaaacatttatcacaccaattgaacgtgaagatattttatcattatgtgatgcaattgatgatgttttagatgcaattgaagaaacggcagctatgtttgaaatgtattcaatcgaatacacagatgaatatatggctgagtttgttgataacattcaaaaagcagttgcagaaatgaaacttgctgtcggcttattagtcgataaaaaattatcacatatgcgtattcattcaattaatattaaagaatttgaaacaaactgtgatggtattttaagacagtcaattaaacatattttcaatagcgaaacagatccaatcactttaattaaaataaaagatatttatgaaagcatggaagaaatcgctgataaatgtcaaatcgtagcaaataattttgaaactattattatgaaaaatagctaaggggagtatatatttatgtcatatataatcatcgtcactatagctgtagttattttctcgctgatatttgactttatcaatggattccatgatacagccaatgcagtagctactgctgtatctactagagcgttaacgcctaaaacggcaattttaatggcagcagtgatgaactttataggtgctttaacatttacgggcgttgcaggcaccattactaaagacattgtcgatccatttaaattggaaaatggattagttgttgtgttagctgcaatacttgcggctattatttggaatttagctacttggttttacggaattccaagttcgtcttcacatgcacttataggttcaattgcgggtgcagcaatcgcatctgaaggctcatttggagtgttacattaccaaggtttcacaaaaattattattgtattaatcgtttcaccgattatcgcattttgtgttggtttcttgatgtattcaatttttaaagttatctttaaaaatgcaaatttaacaagagcgaatcgtaactttagatttttccaaattttcacagcagcgttacaatcattctctcacggtacgaatgatgcgcaaaagtcaatgggtattattacgttggcattaattgttgctaatgtacagaatgatggcagcgttgaaccacagttatgggtaaaatttgcctgtgcgacagcaatggggcttggtactgcaattggtggctggaaaattatcaaaactgtaggtggtaatattatgaaaatacgtccagcaaatggtgctgcggccgatttatcatctgcattaacaatttttgttgcatcatcgctacatttcccattatcaacaactcacgttgtgtcatcatcaatcttaggtgttggtgcttctaaccgagctaaaggtgtaaaatggagtactgcacaacgaatgatcattacatgggtgattacattacctatttcagcattgttagcaggtttactattctatatacttaacttatttttctaattgaaaataaaactaaactgaacttcagtatcacaaacatatggtggtattgaagttcatttttttatgtaagtagataacatattttatatagtttacatagaaagaccaagacaaagcattttaatttggggctatattataaatgtattccatggaacataataagttaggtcattaaaatatatgtaagagcaaaataatgatttaatagtttatattcttcaatgaaggaataattaaatagttatcaacttgtttaattaacctaaattgtattgggctttatttaatataaatttgtatatgtagacgaaaaagcgtaaaatactggtataacaaattaaatcattatatagtcaacttagttgcattattttgatttttaatatattatgcatttaatttaatcaaataggtaggttgttaatttttacctaactaccattcatacaaaatataaatatgtatgatagggaagggtgagataattttttgtaccaaaatgaaaatttttttcaaaaataaaaaactagcaatctcacatgatgtgaattgctagtatatatcagtacaatttatttaattaatggatgaatgcatagctagaaacttctgaagctggaattgtacggtagttcatattgtatggaccatatgtgtaattcatttcagaaatcaagatactaccatcaccattgacacgttcaacataagcaacatgaccatatggaccaggtgtgctttgcataattgaaccaactgatggtgtgttgtttacttggtaaccatcattagctgcgttaccagcccaatacttagcgtctgaccaatatgtgctaattggactaccagcttgagcacgacggtcaaatacgtaccatgtacattgaccagcagtgtataaattttggtgattaaaagatgatgcattgccattgctacctgttgtagctgttggtgttgtaccacctgatccaccattaggaatttgtaatgtttggttaggcataattaaataaccacgtaagttattggctgccattaattgattaactgaaacaccatatctgctagcaatgatatttaatgattcaccagcttgtacagtatgagatgatgctgaaccagcttgtggagaagtgtttgacgtattttgtgcatcacttccacctactgagataacttgaccagggaataccaagttgttatctaattggttattttgtttaatactctctactgaagtgttgtatttttgagcaatactccataatgattcaccagattgtactgtatgttgtgtagaagcttgtgcatcatgatgcgttaaaaatgcagctgcaccagatgttgctgttattgcaaatgctaattttttcaaagggactcctccttaaaattaagttttactacttttaaaaattattaagacaatttatatagtaaattaagttttcgttttatattacgatttccatattatcaaaaataagtagctttgtgtggtttgttattatcttgtaatattattaacattttaggatatcggttcatatttttataaatgctgatttgatagtgtataaaagcgttttagtgattttaactaattataaaaaattatattttgtaacattgtaaaatgtaaaattactatacttgttaaaggttatttcttttgatgaagcaaaatttactgtaaaatttgacgcataaaacgacggtagaaggaggaattattttgtcgcaaaatacaaatcattcatattatcatcaaaaccagcatgctcaatcaataagtaaagtgtggctttattttatgtattattggattatatttggcataggatgctatctaggtcagtttttaccattaagttggcgacaacccttgtcatttggattactgattattattttagcaacacttgtttttgaaagagcgagacggttcggtttaattatttcacatatttacgctgtagtgattggcttattgtcatacgcaacgtttaccacgtatttacaaaatttaggaccagatattttctataaaaatatcgcattagcaatttttgcatttatagcatttggtattattggttatttcttcgttggagatgcatcgagtataggcaaatatttattcgttacattaataacattaattattgcgagtctaattggtatttttcttcaaaatcctattttttacactattattaccgtcgttagtctgttgttatttctactttatactttgtatgattttaatcgtttaaaaagaggtgactattcaccaagagaaatgggatttaatctatttattaatttgttgaatattattaaggatatactttaccttgctaatatgttcagaagataaacagttaaattaataaagaaatttgtataaagttttggaataatcaataatgaatatcaaccttaaattggagcgattgtcataaattagaaatttagatagagattttactgataaagcaataaaaatttattaccttaattgtaaagatattattaatcattaaaatgattaactgctatagttctaaagtaaacaaatcttagaagataaactttaaacaggtgtacttgcctttctaattacacttttattagaaaagtaaagtatagctacgtattaattttaaaatcgaaatattaataggaagaagtatagataatataaacaatttaatgttagtttgagctcatctcaaaagtagaatgtgatttaaataagtgtttatttttaaattgaaaatgaatatataactaacaaaagataatagtaatacgttgtagatgtggtcatttaaaattattttgaaaatactaaaaagtagtgtgttttcaattggatagtttaattaaactgactacatctatttttgtaatatttaaatgattgatatataagtttaaaaattaaccattatatagttttatttatttttgatttggtattcgtattgtgttaaatttacgtttaattaaataagttaaatattatagggaatgataaaagtggtacttaaatatagaaagaggtaaagttatggcaaaatcatgcttgcatatacttactaataatgaatatgcgacaacgcgttgccaagatggcatagtcttattttggccaattgacggggaaatcgaactacaaaaatttcgtaaaagtaaaataattgaagatgatatatatattattaatcatctggatgtatttagtattaagaataataaaaaaacgatcatgttgtatttgagtagcgattggtttgcggaattaggctttactttctttaattaccactatacagcaaagttgattaaatcatcctataatttgaaatgtctactattaaaattgacatatcgataccttgataatcagcctcttaatgacgctgatattagaaaattacaggatattattaaaatcattgcaaaagaagcaagtatggataaaaagattgcacaaaatcaatatcgatatgcttattatggtgatttgcgtgatgagctcgaatatatttatcaaaatgtaaatcaacgattgacattaaaaagtgtcgctgataaattatttgtctcaaagtcaaatttgtcatcacaattccacttacttatgggcatgggttttaaaaaatatattgatactttgaaaattggtaaatcgattgaaattctacttactactgatagtactattagcaacataagtgaacatttaggttttagtagtagctccacttactctaaaatgtttaaaagttatatggatataacaccgaatgaatatcgtaatttatcaaaatataataaatgtttaatgctaaagccagaaccactagtaggcaaaatggtgcaagaagtaaaagaaatcatattgaattatattgaacattataaaaaccacctaactgatgttatacatattgatgaagacaaatttgaaacacctaaattgtttcaaacggttattcaaataaatacttatacagaaatgaaattagttttcttagaaggaatctttaaaaccttattgaataagaacagtcaagttgtctttttcatcatgccatcgattctaaaaagtaaaaataccatgtccgaagaagaaaaattcacaatcattaaaacaataattgaaagtgatctaaagatagcatttaatataaatgatattgaaacaacttattttgttgaagaagcttttatgagtgttttcagacaaatatctccaaacgaattaagtaatcataataattacgaagtgcattttgtttttgatttatcattgatggaaattagaacaatttatcgaatgatattaaaattacataacatcatgttgaatgtgaaattaggattgaacattacctgtttatttgaaaaaccttcagtttttaaatcactagtatcacaaataaagcgacttaaattcgattcgttaataatagataatgcaaatttaagtagcccttatttgatgggggaaagtgatgagttactattgaaaaatattttgcattttaaaaatttaaaacaagtaattaatgaattggatattgaacaagaaaagctgatttttctaaatgttgaaaatcataaactgcttaataataaagaacgagatctaagtaatagtgctccattaatttataagacattaagtgcgctgtatcacaactttgatggctttggattaaacatttttgacaatcatcaagcatttaatgcgatgcatctatatgacaaaaatggatttaaaacaacactaggtcttatattagaaaagtttatcgaatatgtctcgaaaccaaaatacgaaaacagttattattctatttttgatatagagaattattattgtcttgttatttatgattggcgagtgatagagagcgagacaattatgagtaattttgaggatagtcaagtttatataaattttaaaaacaatgttttaaacgataaatatctaattgtaatagaaacattggacgaaaatagtggcaacattaatcatttgatttctaaagaattaagagataaatatgaatggaaccctagtttactatctaaaattgacaactaccttaaaccagcaatagagattaaagagcataattttagtgataattccttgaatattaacgttacttttaatgcgttatacataattaaaataggaaaaaaataacaccttgatatgtattgcaaaatttaatttgcatttgttggtaattttgacaacgtattaaaaacaaatgagaaagacaatggcaaaaaaatttaagataataatgacagaagcattgtctttatatatttgggggtgcaacattttgaatactgagaaattagaaacattgcttggcttctataaacaatataaagcattatctgaatatattgataaaaaatataagttgtcgctaaatgatttagcagtcttagatttaacgatgaagcattgcaaagatgaaaaagtacttatgcaatcatttttaaaaactgcaatggatgagctagatttaagtaggacaaaattattagtttctataagaagactaattgaaaaagaaagacttagtaaagttagatcatctaaagatgagcgtaaaatttatatttatttaaataatgatgatatatctaaatttaatgctttatttgaagatgtagaacaatttttaaatatttaattgaaattgagtgtcgaaagcatagaatttgcttatcggcacatttttaatttatacatattttaaaactaagtaacagtttgaagaaatcgtagttcaataatgttaattgtgaaaatgtatataaacataaaaaaatcatgtataatatatgttgttaattaaacagttcgaaagcgagatgacattatgggacgtaaatggaataacattaaagaaaaaaaggcccaaaaagataaaaacacaagtagaatatatgcgaaatttggtaaggagatttatgttgcagcaaaatctggtgaacccaatccagaatctaaccaagctttaaggttggtgcttgaacgcgctaagacatattcagtgccgaatcatattattgaaaaagcaatagataaagctaagggtgctggagacgaaaactttgatcacctaagatatgaaggatttggcccaagcggatcaatgctaattgttgatgcgttaacaaataatgtaaatcgtactgcctctgatgtgcgagctgcttttggtaaaaacggcggtaatatgggtgtatctggatcagttgcttatatgtttgatcatgtggcaacatttggtattgaaggaaagtctgttgacgaaatacttgaaacattaatggaacaagatgtagatgtaaatgatgtgattgacgataatggattgacaatagtctatgctgaaccagatcaatttgcagtcgttcaagatgcgcttcgtgcagcaggtgtcgaagaatttaaagttgctgaatttgaaatgttacctcaaacagatattgaactttctgaagcggaccaagtaacatttgaaaaattaatcgatgcattagaagatttagaagatgtacaaaacgtattccataatgtggatttgaaataatgaaatcagcagaacaatggattgatgaattgcaacttgaatcacatcctgaaggtggtttctatagagagacaattcgagaagtattgaaagatggacgcagagcgccgtttagtagtatttattttttacttacagatgacaatatttcgcattttcatcgaattgatgctgatgaagtatggtactatcatgctggcgattctctaacaattcatatgataaatccggatggggaatatacgactgcaacattgggtactgatatccaaaatggagatgtattgcaatatgtagtgcctaaaggaacaatttttgcttcttcaatcgaaatatcaaatacttttagtttagtaggttgtatgtgtcaaccggcatttgagtttaagcagtttgaattgtttaagcaatctgaattaattacgcaatatccgcatcttaaatcagtaatcgaaaaatatgctttaaaataaaaatgatcaatgaagtggtttgaaggttgttaataaacctttgagtcacttcatttttatatgtattcttgattgaatcagaatagatttgatgcttcagctgtttttaatgaaaatagcattaaatgattttgaaaacgataagagtgtgttatttatatttttgaaaaatcacttttatgaagaaatgtgtgtactatctaattaatattgtctattttaagtaaattgaagcgagttgtagtaaaataataataaatattttcatatgattaacaaaaactataaaactgtatcatgacatgacatcatttatgtagttttatataataatgacaaggagttggtgactgtgaaagtaaagtatatagataaacgtcactggcgtcgcctaattgatagggaatacacagaggtaaaagttaataataataggtttaagggtattataggcttagtcacgatgaaaaaggttcgtgatcctttagaggtgacggtagttggacaaaatatcattgtcgcagatgacaattataaatggttgcaaatactacctgaaaagaaacgttatagtataactgtaatgtttgataataaaggcaatccattagaatattattttgatataaatatcaaaaatataacgcaaaaaggtaatgcgcgtacagtagatttatgtttagatgttttagcattaccaagtggtgaatatgagttggtagatgaagatgatttaatgtttgcattagaaagtgagcaaattacaaaaaagcaatttcatgaagcatatatgattgcacatcaaattatggcagagttagaaaatgattttaaaggattccaaaagaaaatcatgtactgctttaataaaattaatgcaaaggctcaaaaaaatcatcaaaagccacaaaataaaactaatattgaaaaaagcaaacaaataaagcctaagcaatataatcaaactaaaaatcaccaacaacaaaagaaaaactaagtaattcaagctgcagccatgccaataaaattggtgaaattattcgttagtaatgaactcatgaatgcttgtagccatgaaagttcaataattgaataatttatggggggaaattatgaagattgaagactatcgtttactaataacattagacgaaacgaaaacgttacgtaaagcggctgaaattttatatatatctcaacctgctgttacacaaagactaaaagctattgaaaatgcttttggagtagatatttttatcagaacaaaaaaacaattgattacaacaactgaaggaacaatgattattgagcatgctcgtgacatgttgaaaagagagcgattattttttgacaaaatgcaggcacatattggtgaagtgaatggaacaatatcaatcgggtgttcttctttgattggacaaaccttacttcctgaagttttgagcctatataatgcccaatttcctaatgttgaaatacaagtgcaagttggttcaactgaacaaattaaagcaaatcatagagattatcatgttatgataactcgtggaaataaggtaatgaatttagctaacacacatttatttaatgatgatcattattttatttttccaaaaaatagacgagatgatgttacaaagttaccatttatagagtttcaagctgatccgatttatataaatcaaataaaacaatggtataacgataatttagaacaagattaccatgcaactattacagtggatcaagtagcaacttgcaaagaaatgttgattagtggtgtaggtgttacaattttgccggaaattatgatgaaaaatatcagcaaagaacaatttgagtttgaaaaagtagaaattgataatgaaccgctgattcgttcgacatttatgagttatgatccgagcatgttgcaattgccacaagttgattcttttgtaaatctcatggcgagctttgttgaacaaccaaaggcgtagttttagactaatttaaggtttgtatttaattttaaactattcggttaaattgaacgtagttggttgctaatgcaccaacagcaaaagagcccctaattaataaattaaaaggggacaaaggaatacagttggatgctaacgcaccaacagcaaaagagcccctaattaataaattaaaaggggacaaaggaacgcagttgattgttaatgcaccaacagcaaaagagcccctaattaataaattaaaaggggacaaaggaatacagttggatgctaacgcaccaactgcataagagcccctaattaataaattaaaaggggctctaagaagcggggttatggatatgtttgcagcgttattacaaataaagaattataaactctttgttgctaatatgtttctactaggtatgggtattgcggttacggtcccatatcttgttctttttgcaactaaagatttaggtatgacaacaaatcagtatggattacttctagcatctgcagcgattagccagtttacagtaaattcaattattgctagattttcggatacgcatcactttaatagaaaaattattattattctcgcattattaatgggtgcgcttggtttttcaatatacttttttgtagatacaatctggttattcatattactatatgcgattttccaaggattatttgcaccagcaatgccccaactttacgcatctgctagagaatctatcaatgtttcaagctctaaagatagagctcaatttgccaacacagtattacgttcaatgttctcattgggctttttatttggtccatttattggtgcccaattaatcggtttaaaaggctatgctggattgtttggtggaacaataagtatcattttatttactttagtacttcaagtgtttttctataaggatttaaacattaaacaccctattagtacgcaacaacatgttgaaaaaattgctcctaatatgtttaaagacaaaacgcttttattaccatttattgcatttattttattacacattggacaatggatgtatacgatgaatatgcctttatttgttactgattatttaaaagaaaatgagcaacatgtcggttatttagctagtttatgtgctggtttagaagtgccatttatgatcattcttggcgttttatcatctagattacagactcgaacattgttgatttatggagcgatttttggtggtttattctacttcagcattggggtatttaaaaacttctatatgatgttagcaggacaggtgtttttagctattttcttagcggttcttttaggaattggtattagttatttccaagatatcttaccagattttccaggatacgcctcaacactattttctaatgcaatggttattggacagttaggcggtaacctattaggtggtgctatgagtcactgggtaggtttggaaaatgtattttttgtatcagcagcatcaatcatgttaggtatgatacttatattctttactaaaaatcaaaaaattacaaaagaggatgtgatatcaacatgacaattattttatggctacttatcatcgctgccttcatgttagcatttgttgggttgattaagccgattattccttctgttttagtattatgggttggctttctaatctatcaatttggctttcataatcagcatttatcatgggtgttttatgtatctatgacattgctaacaatattaattttatgtgccgactttttagctaataaatattttgtgaatcgcttcggtggttctaagtttggagagtatgcagctttaattggtgtggttattggatgttttgttttaccgccatttggaattattattataccttttattttggtattcatagttgaattaatacaaggctattcatttgaaagagcagttaaagtaagtataggttcaatcgtagcatttttaacaagtagtatagctcaagcaatcattatgtttataatgattgtatggttctttatagatgctttattgattaattaataaaaagcttattgcaaaatatgtttttcggtaactgtaatttagtgattttatcattaacagtaccaaattcgcatatgatgtaataagctttttgtttataaaaatgtatgagaatgttttttcgaaatatttctttcaatgcgtaatccaataggtataactataaatgaaaatataataaatacccaattgcttacctgaatatatggtccaaaggcaagtaatgattgtggaataaagaatacatagaaaaatcctacaattagtagaatgattgctaaataggtgaatatccatatccaatttgaattgttaaaacactgcagttgtattgttttaaaactaaaccatataaataaaaagacaataaagaatccaacgactactgaaaacgggaatgaaacaaaatataaattacttccatttttttccatgaaaaatcctaaaaatcctttgagaaaactaacaatcccaattaatagaacgatgtgttgatagatatatttaaaaatatttttaaatgtttcattaggcatcgcttttagttcttttattgcatgtgcttttgggtcgtgattgaaaaaatctaaggctaataaaccatgttgttctgcgcttaataattgtttaagtatacggttaataattaactctgtatcatgaggattgacgcgaaagtcagagcgcatataagtcatataattctcgaagatttctctatcagtattgcttaatcttaatgatttaacattattttcttttgttaattgcgcagtacttttcattgttacttaagcgctcctttaaaaatgtttaattccaaattaaaatggaaatgattttatagtattaataaggtcaatcatatcatattaaacgcataaatataacgattaatattggagaggaaaatgaggacacttaataaagatgaacataattatatcaagcaaatagctaatatacatgagacattattgtcgcaagtagaatccaactataaatgtactaaactgagtattgctcttaggtacgagatgatatgttcaagattagaacatacaaatgataaaatttatatatatgaaaatgaaggtcaattaatagcgtttatttggggacattttagtaatgaaaaaagtatggttaacattgaactgctatatgttgaaccacaatttcgcaaactgggaatagctacgcaactgaagattgcgcttgaaaaatgggcaaaaactatgaatgcaaagcgaataagcagtacaattcataaaaataatttgccaatgatatctttgaataaagatttaggttatcaagtgagtcatgtgaaaatgtataaagatattgattagaattaggattatgttgctaattcatgttaaaattaaaaaagatttaatgacgttaaggagttttatatgaagaaattaatcatcagtattattgcggtcatgctatttttaacaggttgtggtaaaagtcaagagaaagccactctggaaaaggatatcgataatttacaaaaagaaaataaagaattaaaagacaaaaaagaaaagcttcaacaagaaaaagaaaaattagcagataagcaaaaagaccttgaaaaagaagtgaaagatttaaaaccttcaaaagaagataacaaggatgataaaaaagacgaagaaaaaaataaagacaaagacaaaaatgaagataaagaggcatcacaagataagcaatcaaaagatcaaactaagtcatcggataaagataatcacaaaaagcctacatcaacagataaagatcaaaaagctaatgacaaacaccaatcataattgaattgcttacttgttatagatgaaaggtacagcgttttaaaccttattttaagggtatgtattaattaaaaagtggtcatgattgaaacagaacgtaaaaatagacaacgtaattaataaaggagagaaacggcatgcatgaacaagattttagaattttagagggtcaagatattactttgccagaattaggtagagaattagaaaatattacaggacatacgattgctgattctactggcgaaattaagcgtgtaattgcacatttaccaaactttgagtccgatacagatacttttgttgctacatatcgtttaaaccatcaacaagattttatagatgcaacttttactgcgctgaaatcagatagagcacgtttaaaagaagtgccagttcatgttgaacttataagttatatttctaaatcaaaataaactgctatctaaaacgcaaagttgatcaaaatatcgattttgtgttttttattgagaaattatataggagtgtcaatcgatgatttattgtgaaacagagcgtttaatattaagagactggcatgaagatgatctgttaccttttcaaaaaatgaatgcgaattatgacgtacgtaaatattttccaagtttattgagttatcgtcgttcagaattagatatgagaactatggatgcggttattaaagattatggcattggattatttgctgtagaagataaagagacacatcaatggataggctttataggtttgaattatattccagaaacaagcgattatccatttaaagaattaccgctttatgaaataggttggcgcttgttgccagaattttggggaaaaggattagcaactgaaggcgcaaaggcaacgttgaagttagcagaagaacatcaaatatacgatgtctatagttttacagcagaagcaaataaagcttcacaacgtgtaatggaaaaaattggcatgacagtgtatgatcatttcgaattacccaatctaagtaagtatcatttattaaaaaggcaagtgcgctattacattaatcttcgaaagtgaaaaatttatacataagcgtaacaaacacccctaacattgtttagctgatgataacaatattaggggtgtttgtttattttttaaccttagaatgattaatcgtatgaacgagtacccagaggtttgaaatttaatattgattctattaatgattccttagtgtcgcataacggtgcaagagcacgatacttaggatcaataaaaccttcctcaatcatatggtcaatcattgtttgtagtggattgaaaaagccattaatattataaatggcaataggcttttcatggatacctatttgagcccaactatacatttcgaaaaattcttctagtgaacctgcgccaccaggagccatgacaaatgcatctgcaagttctgccattttatttttacgttcatgcatagaatcaactaaaattaattcagttaaacgttggcttgtgatttcatgttcatctaacattttaggcatgacgccaatagctttgccgccatgatctaatacaccatcttgaatggcacccataatgccaattgaccctgcaccaaatactaattcataaccttgttcagcaaaatatttacctaaatcgtatgctttttgtacatatgaagggtcatgacctttgcttgcaccacaataaactgcgattcgtttcatgttaatccagctccttaattcgatgaatgacttttaatagtgattgttcaaacactttttgatcttgctttgtaaaaggtgggggacctttgtggcgaccaccttgttttctaatttgtgcattcatatatcgtttatctaatagttgttgaatatttttggaattgtatatcttcccattatgatgcatgacaattaagactttgtcgactaataaacttgcgagtccataatcttgagtgactacgatatcatccttcgttgataattgaacaattttgtaatcaactgcatctggtccatcatcaacatataatgttgatacatgtggaggaaataattggttcgaaaaatggctgaagctccgaataattgtcacaaaaatgcctgtctcagttgttaaatctataatagaatcaacaacaggacaagcatctccatcaataataatatgtgtcacaattatgcctctgtattgttttctttattttgttgagaggcgcttttggcaacataatctttatattttttaaatgacttgatgcgtgctttatcagcttcttgttggcgtttttgttcttctttgtgtcgtttttcaatatttttttgtaactttttattcattttagcgatttctttgcgatttttttcagctagtttatcgccttttttctcagttttctcatctaatttattaggtgttaagcctgctttttcttcgtatttttgtgattttttcatatctttaatacgttgtatttcattcttttcgcgggctttttgctcttctttatgacgcttttcgatatttttttgaagtattttattcattttatcagcgtctttacgattttgtttagctaatttttcgccttttttctcaatataggcaggatcatgttctctagcaaactttttaagttcacgtttattttcaaaatcttgttttttatcgccgacatattctttaacatcactcgctgtgttactgattgctgcagacgtttttgaagcaactttacttgtagcatctgtaactttttgtacgtccggatgttgtttgatacgtttacgttcaacaattaacggtaccaatacaattggtaatacattaatcataaatttgatgacttttttcttatccatagatcttgcctccataattactttattaattttacataccctatgatacatcaatataaacgatgatagtagtgaatcactattaagtatttcagatgttttttaaaagaagacaataaaaactgccaatcaagtggttccttaattgacagtctatattttaaaaggaaattaaatacctttaccaatgccaaatccgaagtaaagtatagcaataaagattactaatacaattctgtaaatggcaaatggaattagtttgattttgttaattagatgcaagaatgttttgattgcaattagtccaacagtaaatgcagctaaaaagcctaaaatataaaaaggtatatcagcaatctgaatatcttgataatgttttaataaagataaaccactagctgctaacataattggaacagccataataaatgtgaagtccgatgctgctttatgatttaatttcattaataccccagttgaaattgttgagcctgaacggctgaaaccaggccacatagctactgcttgagaaataccaattacaaacgcttggaaataattgatttgatccactgtttgtgggtttttaactttaactgaatacttatcagcaataatcatatagatagcacctacgaataagccaatcataacagttggcacactaaataaatgttcttcgatgaaatcatcaaatagtaagcctaaaatacctgctggcaccatacccactaatacatgtaataaatttaaacgtcttggctttgaacgtctttgttgatcgttttctccttcaacatgtttgtgtttaccaatatgtaaaatctctaagaagcgttcgcggaatacccatgctgctgcaaagacggatcctaattggatgacgattttaaatgtaaatgctgattgagaacctaaaaattcagatgattttaaccacatatcatcaactagaatcatatgtccagtagaggaaacaggtgcaaattctgttaatccttcgacgacccctaagataataccttttattaattcaatgataaacataatgtacccactttcattactcaatttaatttatttaaatatcaaaattaccatatcatgatagcatattcatttaaagacatgctagttatagttataatactagactaaagatgtatatattcattttcttttacatgtaaaactacaatattttattgagctatttaatttgattttaaggaaaaccttttataataggtttaggtgatataattgtgaaaaaattaacaacaatactgtttcaatataaaatttttccggtactcatgttcttggtcagtactggtctcggcatactcgttataacgcaaaatattttaatagcagattttttagctaaaattataagacatcaatttcaaggtttatggattgtattatttattttattaggtgttttacttttaagagcaactgtgcaatttctaaatcaatggttaggtgatacattagcatttaaagttaagcatatgcttagacagcgggttatttataaaaataatggtcatccaatcggtgaacaaatgactatactcacagaaaacattgatggtttagcacctttttataagagttatttgcctcaagtgttcaaatcaatgatggttccactcatcataatcattgcaatgtttttcatccatttcaataccgcattaattatgttaataactgcaccatttattcctttgttttatattattttcggtttgaaaacgcgagatgaggcaaaagatcaaatgacttatttgaatcaatttagtcaacggtttttaaatattgctaaaggtttagtgacgttaaagctatttaatcgtacagagcaaacagagaagcatatttacgacgatagtactcagtttagaactttaacaatgcgcattttacgcagtgcttttttatcgggattaatgctcgaatttataagtatgttaggtattggattggttgcattggaagcaacgctaagcttagtagtatttcataatattgattttaaaactgcggcaattgcgattattttagcgcctgaattttataatgcaattaaggacttagggcaagcgttccatactggaaaacaaagtgaaggtgccagtgacgttgtgtttgagtttttagaacaaccgaactataataatgaatttctattaaagtatgaggaaaaccaaaagccatttattcagttaacagacatatcatttcgatatgatgattctgatagattggtattaaatgatttaaatttggaaatatttaaaggtgatcaaattgcacttgtaggtccaagcggggcaggtaaatccactttgacacatcttattgcaggtgtttatcagccaacaataggtactataagtacaaaccagcgtgatttaaatataggaatacttagtcaacagccatatattttcagtgcttctataaaagagaatattacgatgtttaaagatatagaaaataatactattgaagaagtgctagacgaagtaggtttattagacaaagtgcaatctttcacaaaaggcattaacacaataataggtgaaggaggcgaaatgttatctggtggacagatgagacgcatagaactttgccgtcttttagttatgaagccagatctcgttatatttgatgagcctgcaactggtttagatattcaaacagaacacatgattcagaacgttctgtttcaacattttaaagatacaacgatgattgtcattgcacatagagataatacaattcgccatttacaacgacgcttgtatatagaaaatggaagactgattgctgatgatcgcaatatttcagtaaatataacagaaaatggtgatgacttatgaaaacacgactaaaatttcaagtagataaggatttattgttagctatagttgttggtgtttgtggaagtttagttgcgctcgccatgtttttcttaagtggttatatggtgacacaaagtgcacttggtgcgccactatacgctctgatgattttagtcgttacagtaaaattgtttgggtttttaagagctattactcgatacgtagagcgccttatttctcataaagctacatttacaatgctacgtgatattcgggtacagtttttcggtaaattagtaaatgtcattcctaatgtttaccgtaaactgagttctagtgatttaatttcacgtatgattagtcgtgttgaggcattacaaaatatatatttacgtgtttattatccaccagtcgttatcggtttgacagcgctagttacagtcatagttttggcgttcatttcaatcggccatgcgctattgattatggttagcatgttgtttactttactcattgttccttggttaagctcaaaaaaagcacgtactttaaagaaacatgcagctaatgaacaggcccgatttttaaatcatttttatgattataaagctggtatggatgaactacgtcgatttaatcaaattaatcattatcgagataatttgatggctaaattaaatcattttgataaattacaacttaaagagcaacgctttttaacgatttatgattttatattaaatattattgctatgctttcgatttttggtagtttagttctaggattaattcaaattaatgcaggccaactaaatattatttatatgacgagtatagttttaatggtcttaattttatttgaacaagctgtaccaatgacaaatgtcgcgtattataaagcggatactgaccaagcattgcacgatattaatgaagtgatatctgtaccttctactaatggaaaaaaacgtcttaatgataagtatgatgcaacgaacatttatgaagttaaggatgctagttttaagtattggaatcagcaaacgtatgtgttgtcggatattaattttaatgttaatagaggcgaaaagattgcgattgtgggtccttcaggttcaggaaaaagtacattactacaaattatggcagggttatatcaattagatagtggctctgttcgtttcgaaaatatggatatgtttgaaatagatgacaaagataagtttgaatcgttaaatgtcttgctacaatctcaacaattatttgatggtacaatacgtcaaaatttatttaccgatgaaaaagatgaagcggtgcaagcaatatttaagcaattagatttagaacatttggcactagaacgtcaaattgacttagatggtcatacattatctggcggagaaattcagcgtttagcgattacgaggatgttattaaaagatactgcatcaacatggattttagatgaaccaacaactgcattagataaacaaaatagtttaaaagttatggatttaattgaagcacatgcagaaacattaattgttgctacacacgatttaactttattgtcacgttttgagaccatcattgtgatgataaatggtaaaatagttgaaaagggaaactatcaacaattactcgctaatcaaggtgctttatggaatatgattcaatataatgcataaaaaaactgcttgataggctaagaaacctttcaagcagttttttaactaacaagcttacgcgtgctaattgtttttctattcttaataaattctaaacattactttaattgtcatgacaaaagttaattatttttcctttgtttcatcaaatgcatgaatgactttacctaataagcgattaagttctttaacttcatcttgagataaagaagaagctgaagcgactttgtcagatgcattacttaattctggtctaatagtttcacttttgtcagtcaagtgaataaatacttcacgttgatcgacttcggaacgttcacgcttaattaagtctacttgttccattcgttttaataatggtgatactgtaccagtatcgagtgctaattcagttacgactttcttgacgtttacaggagattcatcccataaaattgttaagacaagaaattgtgggtatgttagattgtacttcttaaaaactttgttagagtagtagcgattaacttgtctttgagcattgtacaaactaaagcatagctgttcttttaaattatgttgatcagacattaaagttctcctccagacatactatccgtttttttctcttttcggattggtaatcattaaaaagttgattgtttattaattcacaactttctttgattcaatgccatgctaaaattaaagtatgtttaaagtttagaagatatttttgattaaatcaagcaaaaagataatttaatatatatgttatcatttttaaaaataactgtaatagaaaagagaatataaaatgaaaaataataaagatgaaaaaataagaatatccataattaacggatttttgggtagtggtaaaaccacgttactgacacattatattagtgaattattaaaaaatgatgagaaaattaaaatcatcatgaatgaattcggtacttttgatattgatagcaatagtatttcaaatgaaattgaagtccattcattgattaatggttgtgtttgttgcgatcttaaacaagaacttgtctatgaactaaaagccattgctttaaaaggggacgttaatcatgtcatcatagaagcgacaggcattgcgcatcctttggaattactagttgcatgtcaagatccgcaaatcgttaatttctttgaaaagccgattatttatggtgtattagatgcgactcgatttttagaacgtcatcaatataccgaaaatacagtttcgctgatggaagatcagttgaaactaagtgacatgattattattaataaaattgatcttataactgatgacagtcttgagaaaattgataagcaattaggtatgatttgtgcaagtattccaacttataaaacaacctatggaaaagtttcgttggaagaattggacttaactgttaaagacagagagatatcgtctcatcatcaccatcatcatgggattaaaagtatgacttacacgtttacaggtccgattgatcgtcaattgttttatcaatttataatgaaattaccggaatctgttctacgtttgaaaggttatgtgtcatttagagatcaaccaaatgcaatttatgaatttcaatatgcatatggtttaccagactatggaataattggcatgcaattaccattaacgattgttattattggtgaaactttagatacaaatcacatacgtaatcaattggatatgctacaatttacgtaaatcagaaaatgtgttgtttcaatttaacggaaatagcacattaatttcttaatacttttattgtgaatattttgtgacattgagggatggagtggatgagatatggaacaaataatgattaatcactatgttcatttttctaggcttgtacaaggtttttggcgtgcaaatgaatggaagatgactgcgaaagagttaaattattttataaatgaattagttgaacgtggaattacaacgatggatcatgctgatatttatggggattatcaatgtgaatcactgtttggtaatgctttggatttatcacccgaattaagaaataaaattcaaattgttacgaaatgtggtatcattttgccttctaagcaatttgattttacaaatggacatcgttatgatttgagtagtaagcacatcgtgaaatctgttgaacagtcattaatcaatttgaatgtagattatttagatagtctactcattcatcgtccttcaccattgatggatccagaacaagttgctgatgcattaactaaacttgttaaacaaggtaagttgaagtcattcggggtgtcgaattttaatcattcacaataccaattgttaaatcaatatattatgaaagaaagactacatattagcatcaatcaattagaattatcgccatatcacgttgatagtttacaagatggaacaatggattcaatgtatcaaaaccatgttcaaattatggcttggagtccttttgcaggcggtaaaattttcgacaaggaagatattaaagcgcaacgtattatgaaagttgttcaattaatagctgacaaatatggtgtgagtgacacagctgtgatgatagcatggttagtaaaaataccgcatagtatcatgccgatacttggaacaagtcagttaaagcgtattgatcaagcaatcgaagggctacaacttaatttagatgatcagtcgtggtttgacatttacaccgctattatcggacaagatattccgtaaacttatttacttttaaatcataaaggagcatatcatgacaaacgaagataaacgtttcgaacaattaagatttgaacgcaaatttatagttattccgtatttaatttatgcagtcattgtattactattaaatattttctattctgatttgaaaataacaatgacattattcggacttttctttgcgtataatgtagtcattttgttcatagcatttattaaacattataaacgcacattgttactaagtcttatattaacagtgcttagtggcgcggcattctttggaattatttatgtttatggcattaatcatttttaaatattaaaaagagactatctacaataatctcatttgcattttatctaactaagtttaacttttgcttagaaaaatgatgctatgaggatattcagtagatagtttttttatgatctaatatttaaacttagatatcgttttgtaattaaccgagataactcatcacctagcaatattatttacaaaatatttcgataaaattgtgtattttgcataaattaaaaatgtatgttttaaaaaattgttataattaaattaagattaaacaaaggggtgactgttatgtcagaagaaaaacatgtagtggaacatgaacaacaaaagaaagaaaagacaaaaaagcaatacaagccattttggattgtcatgagttttataatacttatagttgtactattactcccggcaccttcaagtctgccaataatggctaaggcagtactagctattttagcttttgcagttattatgtgggtaacggaagctgtatcatatccggtgtcagcaactttaattattggcttaatgatattacttttaggatttagcccggttcaaaatttaggggagaagctaggtaatccgaaaagtggcagtgctgttttagctggaagtgaccttctaggaactaatcatgcattatcattagcgtttagtggatttgcaacttcagctgtagctctcgttgcagccgcattatttttggctgctgctatgcaagaaacgaatttgcataaaagactagctcttttagtgttatcaattgttggtaataaaactagaaatatagttattggagcaattatcgtttcaattgtacttgcatttttcgttccttctgcaacagctagagcaggggcagttgtaccaatcttgctgggtatgattgcggcatttaaagtttccaaagatagcaagttagcgtctttattaataattacttcagtacaagctgtgtcaatttggaatattggtatcaaaacggcggcagcacaaaatatcgtagcgattaattttataaaccatcaattaggatttgatgtttcatggggcgagtggttcttatatgcagcgccttggtccatagttatgtccgtagctttatatttcatcatgattaaagtgatgcctccagaaattaatacaatagaaggtggtaaagatttaataaaagaagaattgcataaacttggccccgttagcccacgtgaatggcgtttaattgttatatcgatgttattattactgttttggtcaactgaaaaagtattacatccgattgactctgcatccattactattattgctttaggtgttatgttaatgccgaaaattggtgtcatgacatggaaacatgttgaaaataaaataccatggggaacaattatcgtgtttggtgtaggtatttcactaggtaacgttcttttgaaaacaggtgcagctcaatggttaagtgatcaaacttttggtgttttaggtttaaaacatttacctattatcgcgacaattgcacttatcacgctttttaatatattgattcatttgggctttgcgagtgcaacaagtttatcatcagcgttaatacctgtttttatttcgctaacctctacgttacacttaggagaccagtctataggatttgttttaattcaacaatttgttattagttttggtttcttattacctgttagtgcacctcaaaatatgttggcttatggcactggtacttttacggttaaagatttcttgaaggcaggtataccattgacaattgtagggtatattctagtgatagtttttagtatgacttattggaaatggttaggtttgctttaattaaaaatataaataagaatctaggttattttaaagtgacaaaaagcttaataaaataaaaagataattgaagggtgttttgtttatggcaattgctgtgttattaaatcgaatgtttcgaatggaacacaatccattatttgaatatatttatcaacaaaaagaagacattgatgcatgttattttatcattccggaagaggacatgtcttcagcttctgatttgaaagcacagttttatcgcggtactttgcagcgcttttaccaatcgttgcacgcagaaaagctcacaccttatgtcatgtcttatgacgatatcatttcattttgtaaagaaaacaatatatctgaagtagtgattgcgggtgatattatgagttatcatcttgaagaatatgatattttacatcaacgttctttattcaatgaagcacgtattgccgttactttaatacgtgggaatcattactttaaagcgagtaaaacaatgaatcaacaaggggagccatacaaagtttttactagtttctataaaaaatggcgaccttacttgaggcatagagacgtatatcactatgatttaaaatcattcgaagactttgtcattgcatcacctgatgatttagtgtttgatgacatagcgtttggatcctcacaaataattgaacagaataaatggcaacattttttagatcaagatatacagaattacgaaagcggaagagactatttacctgaagtgttaacaagtcagctaagtgttgctttagcatatggattattagatattattgaaatttttaatgatttattggcgcgttatgatcaagatgaggcaaactatgaagcatttatacgtgaactcatttttagagaattttattatgtgttaatgacacagtatccagaaacctcataccaagctttcaaacctaaatatcgacagataaaatggtcgcaaaatgaaacggattttaatgtatggtgcgaagggcaaacaggatttccaatcattgatgcagcaataatggaattgacacaaactggttttatgcataatcgaatgagaatggttgtgtcgcaatttttaaccaaagatttatttatagattggacatggggagaaaaattctttagaaagcaccttattgactatgatgcagcatcaaatattcatggatggcaatggtctgcttctacaggtacggatgcagtaccgtattttagaatgtttaatccaataagacagagtgaacgctttgatgctaaagctttgtatatcaaaacatatcttccgatttttaatcaaattgatgcaaaatatttgcatgatacacaacgcaatgagtccaacctttttgaacaggggattgaattaggtcgtcattatccaagacaaatggtagatcatcaagaaaaacgtacacaagttttagctacatttaaagcgctagactaattcggctcaattgatagatcaggcatgagtaaaatctggagcagaatataaagttcttaagcaatataaataagccaatttctattattgatgtgatagaaattggctttcctcaaatatataagttgtatttagttttcttattaatttgatgttatcttagtatgtccgtaaataaagtgaggtatagtacgacatactctaaaaacgtagcgagataaatatatttcaatctaacttttatgttttgaggcacttgccatttaggatattgtcgttcgtaatacgacacttgttgtataaatacacctagtccaaatggcagcatcatgagtaagatacttcttaaataacttaaaccaatatcatgccatatgtgtccaataatcaattgaaagccaatgatagatattattaaaacgattatatttattgtcacttgttcaaacgcactccttttccaaataatagaattgctgcttgcatcacaaccataaaacatacaaacatagcagttttaagcgttagactttctagaatgtgatttaaaacatgtaagggctcattaaagaaataaacggaatgtaagcgtaagaaacgaccaatataaattccgaatccatttaaaaacattagcacgacaacaattaatctattaagccaacggtgagaagtcaatgttagtatttcaaaatagattaaaatcatcacataaaccgctaagaagacaccaagcagtaaataggtaaagtatttccactcacttaaatttagtcctgcgtaaaagttgaattgaaattggttcaaatggattaaatcagttaccatataaaatgtatttggtaaaagtaacacaaatataaaactatatatgataaagagtggccattcatactttttattcggtttgaataatcgtaataatagactaagctcaaaaggtatatatgctaaaaacaaatttaaagtcataaattgaaaaattttagtctcaaaaagggagacgataaataaaattaaaaagtaaattctagcgatatatcgagattgcatcaataataaacactactttctaatgaaaaagttattcattcaaatgtgatagttataaacgcattcaattcctaattaaaaatttaatttaactcgttgaagtatattaataaacgagaatgcatttatgattaagcacttatgataacttgtaataaaatttgattcaactaaaaagtaaagtgctattgaggatcaagtaaatttaaaccgactgcatctttgaatgaacgttgaatgtccaaatcagttacagtaagaatgatttcagcagttgcagaaacaattgctttagcgagatgtccgctaaaagtttcatatgattgagtaccgaaagtagcatgcaaatgtgcaaaatgaccattgtctagacgagaaatattacctaataagctcgtcaattccagtagctcagtaatatgtttttcttcgtattgtttcgttgttaaattgaaaaattttaatacaacgtcatcacatgcaccaatgccgctgacagatgtaaatgttaagtcttggtcatctgcaaaggttgttatacattcaacgatatcttctcttttttccaacactagtagtatagtatgattacttttttgcaatttcatatgatcaatcccctttattttaatatgtcattaattatacaattaaatggaaaatagtgataattacaaagaaaaaatattgtcaaatgtagcaatgttgtaatacaatatagaaactttttacgaatatttagcatgaattgcaatctgtcgtggaaaagaagaataacagctttaagcatgacatggagaaaaaagaggtgagcatatgaataaacagatttttgtcttatattttaatattttcttgatttttttaggtatcggtttagtaataccagtcttgcctgtttatttaaaagatttgggattaactggtagtgatttaggattactagttgctgcttttgcgttatctcaaatgattatatcgccgtttggtggtacgctagctgacaaattagggaagaaattaattatatgtataggattaattttgttttcagtgtcagaatttatgtttgcagttggccacaatttttcggtattgatgttatcgagagtgattggtggtatgagtgctggtatggtaatgcctggtgtgacaggtttaatagctgacatttcaccaagccatcaaaaagcaaaaaactttggctacatgtcagcgattatcaattctggattcattttaggaccagggattggtggatttatggcagaagtttcacatcgtatgccattttactttgcaggagcattaggtattctagcatttataatgtcaattgtattgattcacgatccgaaaaagtctacgacaagtggtttccaaaagttagagccacaattgctaacgaaaattaactggaaagtgtttattacaccagttattttaacacttgtattatcgtttggtttatctgcatttgaaacattgtattcactatacacagctgacaaggtaaattattcacctaaagatatttcgattgctattacgggtggcggtatatttggggcacttttccaaatctatttcttcgataaatttatgaagtatttctcagagttaacatttatagcttggtcattattatattcagttgttgtcttaatattattagtttttgctaatggctattggtcaataatgttaatcagttttgttgtcttcataggtttcgatatgatacgaccagccattacaaattatttttctaatattgctggagaaaggcaaggctttgcaggcggattgaactcgacattcactagtatgggtaatttcataggtcctttaatcgcaggtgcgttatttgatgtacacattgaagcaccaatttatatggctataggtgtttcattagcaggtgttgttattgttttaattgaaaagcaacatagagcaaaattgaaagaacaaaatatgtagcataagtattttggtgtatattgatataaagtaaagcgtaatattatgaatgattagcatcgtttttcttatgaattttattaagaaaattcgatgctttacatttaaaaagattcgattgactaaatgttttactctttatatttaaatgttatatgtaacaaaaaatgattttgagtaataaacatgttacaaatattacattctttttaaattgcaatccacatacctaattcattaacgttaatgtgttaagatgataaaaaatgagtaaggaaatgtgggtaaggggatgacagtaaaaaatttatttttaggctttgttgctgtaatattaaccgtttgtttaattggtttattaatattagcaacaaatgaagatgcgcttgctaaggtacataaaacaattaatacgcttaacgcgataaatgtatcaactgaagatacttataaaaagaaaatggatattctcaatattcatactgctaaagcatctgaagtgaatgaaaatgtgaaaaagcaaaatcattttaaacatcgtgtgaatgcaaataaatcaaattcttttaacgaacaagagtgccaagttattgctgatcgttatgcagataagcatatcaatgataattatggtttagaaagaatttctaagacaaatcatggatataattatgtgtattccaatgataattcaactagtaagcaacatgtaagtatttcaaatcaaggcataataacgaaataatagatggaacagtgtattctaattggatatactgtttttattttgcaataatttaatttaaaaaggtgaattcaacttataaaatgatgtaaatgttatgtcaaaatcaaccaatccgtaatgtattttaaaatgttaatatagttctgaagaagtataaatgaggtgttgaaatggctaaaaataagaaaacgaacgcgatgcgtatgcttgatcgtgcaaaaattaaatacgaagttcatagctttgaggtaccagaagaacatttatcgggtgcagaagtcgcagaactcatacaagcaaatgttaaaacagtatttaaaacgcttgttctagaaaatacaaaacatgaacattttgtatttgttatcccagtaagtgaaactttagatatgaaaaaggcagctgctttggttggagagaagaaattgcagcttatgcctttagataacttgaaaaatgtaacgggatacattcgtggtgggtgttcgcctgttggtatgaaaacattgtttccaacagtcgttgacaaatcgtgtgaaaattatagtcatatcagtgtgagtggtgggcttcgaacaatgcaaatcacaatagctgttgaggagttgattacaataactaaaggcaaaattggagcagttatccatgaatgattaataacaacaaaaagtatggggcaagattaggagtgtgacagagatgaaatttttataaaattcatttctgccacactcctttttgattgaattagcattttacgatcataaacagtcattataattgagtatttgaacataaaaatgtaattttatcgtcacaatttgagtgtttgtgattgtttttggtaatttatgattgaaaagtgaaagcgtactcattataatacaaagtgagatggggtgatgatgataattactgaaaaaagacacgagttaatattagaagaactttcgcacaaagattttttgactttacaagaattaatagatcgaactggttgcagtgcttcaacaatacgaagagatttatctaaactacaacaattagggaaattgcaacgtgtgcatggtggtgcaatgttaaaagaaaatcgtatggttgaggcgaatttaactgaaaaattagcaacgaatcttgatgaaaagaaaatgattgctaaaatagcagctaatcaaatcaacgataatgaatgcttatttatcgatgctggttcatctacattggagctaattaaatatattcaagcgaaagatatcattgtggtaaccaatggtttaacacatgtagaagctttacttaaaaaaggtattaaaacaattatgctaggtggtcaagttaaagaaaatacacttgctacgattggttctagtgctatggagatattaagacgatattgtttcgataaagcttttatcgggatgaatggattagatattgaacttggattaactactcccgatgagcaagaggcattagttaaacaaacagcaatgtcattagccaatcaatcatttgtacttatagatcattctaagtttaataaagtatattttgctcgtgtacctttgctagaaagtacgacaatcatcacatctgaaaaagcattaaatcaagaatcgttaaaagaataccaacaaaagtatcactttataggagggactttatgatttatacagtgactttcaatccttcaattgactatgtcatttttacgaatgattttaaaattgatggtttgaacagagcaacagcaacatataaattcgctggggggaaaggtattaatgtctcgcgcgtcttaaagacattggatgttgagtcaactgccttgggatttgcaggtggatttcctgggaaattcattatagatacattaaataacagtgcaattcaatcgaattttattgaagttgatgaagatacacgtattaatgtgaaattaaaaacaggacaagaaacagaaatcaatgcaccgggtcctcatataacgtcaacacaatttgaacaactgttacaacaaattaaaaatacaacaagcgaagatatagttattgttgctggaagtgtaccaagtagtattccaagcgatgcgtatgcgcaaattgcacaaattacagcacagacaggtgctaaattagtagtcgacgctgaaaaagaattggctgaaagcgttttaccatatcatccactatttattaaacctaataaagatgaattagaagtgatgtttaatacaacagtgaactcagacacagatgttattaaatatggtcgtttgttagttgataaaggtgcgcaatctgttattgtctcgcttggcggtgatggtgctatttatattgataaagaaatcagtattaaagcagttaatccacaagggaaagtggttaatacagttggctctggtgatagtacagttgcaggcatggtggctggaattgcttcaggtttaacgattgaaaaagcattccaacaagcagtcgcatgcggtactgccacggcatttgatgaggacttagcaacacgggacgctatagaaaaaataaaatcacaagttacgattagcgtacttgatggggagtgaaaataatgagagtaacagagttattaacaaaagatacgatagcaatggatttaatggcaaatgacaaaaatggtgttattgatgagttagtaaatcaattagacaaagcaggtaaattaagtgatgtcgcgtcatttaaggaagcgattcacaatcgagaatcacaaagtacaactggtatcggcgaaggtattgctattccacatgcgaaagtagccgcagttaagtctccagctatcgcattcggtaaatctaaagaaggtgtagattaccaaagtttagatatgcaaccagctcatttattctttatgattgcagcgccagaaggtggcgcccaaacacatctagatgctttagctaagttgtctggtattttaatggatgaaaatgtacgcgagaaattattacatgcttcatcacctgaagaagtactagcgattatagatgaggctgatgatgaagtgacaaaagaagaagaggcagaagctgaagcacaacaagttgcaactgcagaacaatcatctaaacaatctaacgagccatatgtgttagcagtaactgcttgtccaacaggtattgcacatacgtacatggcacgtgacgcattgaaaaaacaagcggataagatgggtattaaaattaaagtagaaacgaatggttcaagcggcattaaaaaccatttaactgaacaagatattgaaaatgcaacaggtatcattgttgctgctgatgttcatgttgagacggatcgcttcgatggtaaaaatgtcgtagaagtaccagtagcagatggtattaaacgcccagaagaattaattaataaagcattagatacaagtcgtaaaccttttgttgcccgtgatggtcaaagaaaaggtaactcaaatgacagtcaagaaaaattaagcccaggtaaagcattctataaacacttaatgaacggtgtttctaacatgttgccacttgtaatatctggtggtattttaatggcaattgtatttttatttggagcaaattcatttaatccaaaaagctcagagtacaatgcgtttgcagagcagctttggaacataggtagtaaaagtgcattcgcgttaatcattccaattttatctggattcattgcacgtagtattgcggataaacctggtttcgcttcaggtcttgtaggtggtatgttagcaatttcaggtggttcaggatttattggtggtattattgcaggtttcttagcaggttacttaacacaaggtgttaaagcgatgacacgtaagttaccacaagcattagagggattaaaaccaacattaatttacccactattgacagtaacagctacaggcttattgatgatttatgcctttaatccaccagcatcttggttaaatcatttgttattagatggattaaacaatttatcaggttctaatattgtattattaggtttagttattggcgctatgatggcgattgatatgggcggtccattcaacaaagcggcatatgtttttgcaacaggtgcgttgattgaaggtaatgcagcaccaattacagctgcaatgattggtggtatgattccaccgttagcaattgcgacagcgatgttaattttcagacgtaaatttacaaaagaacaacgtggttcaattatccctaactatgtgatgggtatgtcctttattacagaaggtgcgattccatttgcagctgccgatccattacgtgttattccttcaatgatgattggttcaggtataggtggcgcaattgctttaggcttaggttcacgaattactgcgccacatggtggtattattgtaattgttggtacggatggtgcacacttacttcaaactcttattgcacttctagttggtacattagtttcagcattaatttacggtttaatcaaacccaagttaactgaaacagaaatcgaagcttcaaaatcaatggacgagtagttttaatgatgtaaaatgattgttagcaaagagcttcatattaagttgtaagttcaatgaatatatgttagttttatacatcgtgttaacggtagcttatacaaagctgtaaaaacactttctattaattcagtttttatgaattgatatgaaggtgtttttatttttagataaatgaatgaagaaatagacaccacaaatgtatagacttttttaatattttgcaaaaagttatgccaaacgaagcagatatagtaaaatatgagtgtcttaaagtgaaaatttataaataaagaagggtttatacgtgtcagaattaattatatataacggcaaagtttatactgaagatggcaaaatcgataatggttacattcatgtgaaagatggacagattgttgcaattggagaaggggatgataaagcagcaattgataatgatacgacaaataaaattcaagtgattgatgctaaaggtcatcatgtattaccaggttttattgatatacatattcatggtggttatggtcaagatgcaatggatgggtcatacgatggcttaaaatatctatccgaaaatttgttatctgaagggacgacatcatacttggccactacaatgacgcaatctactgataaaatagataaagcacttacaaatattgctaaatatgaagcggagcaagatgttcacaatgcagcggaaattgtaggtatacatttagaaggaccatttatatctgaaaataaagttggtgctcaacatccgcaatacgttgtacgcccatttatcgataaaattaaacattttcaagagactgctaacagattaataaagattatgacgtttgcacctgaagttgaaggtgcaaaagaagcgcttgaaacgtataaagatgacattattttttcaattggtcatacagtggcaacatacgaagaagcagtcgaagctgttgagcgaggagctaaacatgtcacgcatttatataatgcagcgacgccattccagcatagagaaccaggtgtttttggagcagcatggttgaatgatgctctacataccgaaatgattgttgatggcacacattctcatccggcatcggttgctattgcttaccgtatgaaaggtaatgaacgtttttatttaattaccgatgcaatgcgtgcaaaaggtatgcctgaaggagaatatgatttgggtggacaaaaagtaactgttcaatcgcaacaagcacgtcttgcaaatggtgcgcttgctggtagtattttaaaaatgaatcatgggttatgtaacttaatatcatttacaggtgatacattagatcatttatggcgagtaacaagtttaaatcaagccattgcattaggtatcgatgatagaaaaggtagtattaaagtaaataaggatgcagatcttgttattctagatgatgatatgaatgtaaaatctacaataaaacaaggtaaggttcacacatttagctaataaataatcataattaaatgtatgcaatagatttaatctgttaacataagcactttatattatgataaaatagaagcaataacatttttttctgggggtgtctaaatgggaaggcgataacatgtaggtgtaatttaagtcatagtgataaatttgaatgcgtgttacccatgagtgacacatataacatggaggtgaatccctagaaatagggaattaattggaaacttcgaccataattagtttgattatatttattctattaattgcattaaccactgtatttgttggttcagaatttgcattagtaaaaattagagcaacaagaattgaacagctagcagatgaaggaaataaacctgctaaaatagtaaaaaagatgattgctaatctagattattatctttctgcttgtcagttaggtataacagtaacatctttagggttaggttggcttggtgaaccaacgtttgaaaagctattacacccaatatttgaagcaatcaatttaccaactgcattaacgacgacgatttcgtttgcagtgtcatttataatcgttacgtatttgcatgtagtacttggtgaattagcgcctaaatctatagcgattcaacatactgaaaagcttgctttagtatatgcaagaccattgttctatttcggtaacattatgaaaccattgatttggctgatgaatggttctgcacgtgttattattagaatgtttggtgtaaatcctgatgcccaaactgatgcaatgtcagaagaagaaatcaaaattattattaacaatagttataatggtggagaaatcaaccaaactgaattggcatatatgcaaaatatcttttcattcgatgaaagacatgcaaaagatataatggtacctagaactcaaatgattacactaaatgaaccttttaatgtagacgaattactagaaacaataaaagaacatcaatttacgcgttatccaattactgatgatggtgataaagaccacattaaaggatttattaacgtcaaagaatttttaactgaatacgcttctggaaaaacgattaaaatagcaaactatatacatgagttgccaatgatttcagagacaacacgtatcagtgatgcattaattagaatgcaacgtgaacatgtacatatgagtcttattatagatgaatatggtggaacggcaggtattttaacgatggaagatattttagaagaaatcgttggagaaattcgtgatgaatttgatgatgatgaagtgaatgatatcgttaaaattgataataagacattccaagtaaatggtagagtactattggatgatttaactgaagagttcggtatagaatttgatgactctgaggatattgatacgataggtggatggttacaatctcgtaataccaatttacaaaaagatgattacgtggatacaacttatgatcgctgggttgtttcagaaatcgataaccaccaaattatttgggtgatattaaactatgaatttaatgaagcgagacctactatcggacagtctgatgaagatgaaaaatcagaatagatattaatatataaaccaactaagaatgatttaattcatttttggttggttatttttttgactaaaattaatgaaaagtgaaaatagtattggaactcaatatctttaatgatttaatgaatattttttattgaaagcgataattcgtattaattgagtttgttgaaaaatttagggtaatgtaaagatataaaagatacatagattggagagatataaagatgttgaatgagatacaaatattaaataatggatacccgatgccttcagttggattaggtgtttataaaatctctgacgaagatatgactaaagttgtaaatgctgcaattgacgcaggctatagagcgtttgatacagcatacttttatgataatgaggcttcactaggacgagcattaaaggataatggcgtcgatagagaagatttgtttataacaacgaagttatggaatgactatcaaggttatgagaaaacattcgaatatttcaacaaatcgattgaaaatttacaaactgattatcttgatttatttctaatacattggccttgtgaagcagatggtctatttttagaaacatataaagctatggaagaactttacgagcaaggtaaggtaaaagcaataggtgtatgtaattttaatgttcatcatctagaaaaattaatggctcaatcaagtatcaaaccaatggtgaatcaaattgaggtacatccatattttaaccaacaagaattacaagaattttgtgatcgtcacgatattaaagtgactgcatggatgcctttgatgagaaatagaggactactagacaaccctgtcattgttaaaattgctgaaaaatatcataaaacaccagcacaagttgtattacgttggcatttagcacacaatagaattattattccaaaatctcagacacctaaacgcattcaagaaaatatagatattttagattttaatttagaattaacagaagtagctgaaattgatgctttaaatagaaatgcaagacaaggtaaaaatccagatgatgtgaaaattggggatttaaaataactggatgttaaattttacgtttatgaatgccttttaatgtgtacattaaaataaatgagttggtttttactatttgataaaacaatactcaggtacattcaaaatcttttaaataaaaaggatggacatagatgaaaattagagtcgtcattccttgttttaatgaaggggaagtcattacacaaacacatcaacaattaactgaaatactttcacaagatagtagtgtgaaaggctatgattataatatgcttttcatagatgatggtagtacggataccactatagatgaaatgcaacatcttgccacaatagataggcatgtcagctttatttcttttagtagaaattttggaaaagaagcagctatgattgcaggttaccagcatagtactgaatttgatgcagtcatcatgatagattgtgatttgcaacatccacctgaatatattccgaaaatggttgaaggttttatggaaggctatgatcaagtgattgcaaagcgtgatagaagtggtgaaaattttagtcgcaaaacattaagccatttgtattataagttagttaattgctttgtagaagaagtacaatttgatgatggtgttggtgattttagacttttaagccaaagagctgttaaatccattgcatcacttgaagaatataatcgattttcaaaagggttatttgaatggataggctataatactaaagtgtttacgtatcaaaatgttgagagacaaaaaggggaatctaagtggtcctttaaaaagttatttaattatggtattgatggattgatttcctttaatagtaaacctttgagaatgatgatttatcttggcttgtttatcttttcaataagcgtgctatatattatctatttattcatcaatattatgatatctggtgttaatattccgggatatttttcaacgattgcagctattttattattaggcggcatacagttaatttcaattggtgttgtaggtgaatatattggcaggatatattatgaagttaaggcacgtcctaaatatattattcaagctacaaatctttcaagtattgaaaatgatgagaaggatacccataaagtttattctaaataaacaaaaaaagaagccctcattaatgggagcttctttttagtctttgcattttattttataaataaatcggattatgacgtaatgtctaatttgtgtaatgttacagtcatcgtagttcctacatctatatcactgcttacactgatttttgcgttattttgttgcgcgagttcattagctatatataagcctaatccagaaccacccgtttttgtattacgagagttttctactctgaatgtacgttcgaatatacgttcttgtagttctggtataatgccaataccttcatcgctaatagcaatgtcgatagtatcttgatctttgttttcactaatattaatatcaatgcgactaccaacatttgaaaattttagcgcattatcaagtaagtttgttaaaatacgctcaagtggcgttcgatattgataaaatgcatcaatttcgctacagaaattcacttctaatgtgcggttttcatgtttgatacgttgctcatatggttgcaatattgatacaagtaattggtctagttgtattaattctgggggatatgttttacctgtatttaaagtgataatatgagtcatatcatcaaataatgttgataatctgtttgcttgtttaattaatatgtcgtatgactctttaatctcatgatcctttgtgattataccatcacgtagtccttcagaatatgaaataatgcttgctaaaggtgtttttaaatcatgggctaagttttgaatcagttctgttttttcttgttgttcggatttaatttgattcatttgttgcgtaatttcagaagccattttattaaaagattgatttaattcataaatttcttttggtgaattaaacgttttatcattgcttgcgtaatttccgttagcaaattgcttagtttttatattaaactgcttaattttttgtataagtggattaataaaaatactacatattaataaggttaaacagcttgtaattattgtcgttaaggtcaaagttagtgtcatatggccgttaaaccacattaaaatatatgcaattgctaaaatagttgaagttaatagtatactcgatacgacgccaataatgatttgacttctaattgataacaccattatcggctcctttcaaatttatatcctaatccccatacagttgtgatggtatatgttgtaaagctctctttttctaatttttctctaatacggtgtatatggacattcacggtattagcatcttcgtaatagtcatatccccaaactttttcaagtaattctgatttagaaataacttcattttctctagaagctaaataccacaataactcaaattccttaatacgcatagggacttcgtgaccatttacagtcacaactttacttaagttaataagtgttaattcatcaaacgacagttgttcaactggttgatgatggtatttcttcattcttgtaagtaaattattaatacgtaaaacgagttcccttggactaaatggttttttgacatagtcatctgcacctaaagttaaggcgtaaatggtatcatgttcttgtgttttggcagttaaatagataaaggggatatctaatttttgccttttcatttctttgacaatgtcgtaaccattaacttctggcatcatgatatcaagtaccatgatatcaatatcatttgatagtaaagaaattgcttctttaccgctagttgtcgttgttactttgtaaccttcatattcaaaataggtttgacaaatgtctacaatgtcttgttcatcatccacgatcagtaagtgggtcatctattttttcacctctgttcttacgacctctaaagtaattaatgatttctttaagtgaaatctgttttaacaatgagtgactcattagtaaaaggataaagaaagttaattgaagaggatacgtaaatatcatatctgctaagatataatttatcataacaaaggctccaaagaaactagcagcatatgcaaaaactccaaaaattaaacctaatccaattgcaatctctccgagtgggacaacaatatcaaataatgacgtcgtatgtgcaactatatttgcgaaaaaccacttataccactctggtgaatcagtattgttagcgatgactggtactaaacctttaagcgtaaatccgcccgttaatttttcgtagccttgcattaacataacaatacctgaacccacacgaatgataaatgtaacgagtagcaataatttattcatgatgttcacattctttctatttattgtgtgtaatttatataaacataagattaagcaacataatgcgatttgtagtgttatgtgaacaggaagtgtttgagctcatgggttgcttaagctaaacaaacctcaagctctaaaaaaatttacttatgtgctctgcaatcttatgggatttaatagttgtatatatattgaaaaaaggaaagtatgatttctacaagctaggggggctgtgaaatcatacgctttccattgagtaatgagtgtaatgtatatttttaaaatttgtaatgtatagtaatagtatgttgtaaataaaagtttaactcagaaattgattattttaatttagcgccgccgaagatgacgtgagcttttttacaatagattgttacttcatcatatttgcttaaatctacatttttaagatcaaatgtttgtttttctttatcgtagtcaaccattgcgatttctttaccgtttttaatgtcgccattttttgttaggtagacgtataaatctggaccttttgatgatttgtagttagtaagcattaatttaccatttttaatctcagctttaccttcaacagtttcaccgtttttagaactgaatgtaccagttaggtgttttgttttatcagttttaacattgctatcttctgattttgttttttgttcagttttgttaccttgatcttgtgaattagaattaccacaagcgcctaaaattaatacagaggcaacagcaccaactgctaaaaaatattttgtattcatgctaactcctcatttcttcaatttgataagttaagtttaaaatgaaggcaaataatatgccattaactaattcttaacttcgtttaaatatcgcttaactaatattgaagaaagaataatttgaaaatgaaaataattgtctgatttaaataaataggagtcaaaataagaggagggcggttttttaagtaaggaaatatttatctaaactagttatcactaaaaaacacttctgatattttgaactaagaatatcagaagtgttttttagttttggtattaaaatttataaaccttttgccacaataaaaacaacaagaaaataagatagacgattaaatacaagtaccaatatggtgttaaaaccatcataacgataaatgaaatgttaataatgataagtcctttaatcattagtttctttattttattattattttcagcagtttcatctaagctattaaatgttgaaataaacaacataataccaccaatgatgaaaatggcaggggctaaaaatggaatagacatatatattgattgtgtacttgaaaagtcggtaacacgttgcgttaaactgacaacaatcgttaatatgatagcaataaatttttggtctgtaatgtatacaggttttaattttttatcaatgtaaaactgtagtatcgtccaaatgataaacatcgttatagtacacagagtaataaagttatatttatcaattatgaatgtatttataaaggcgtttatcgtaatagataacaacattgcacttaatgataaatgttgcatttgatgcctatataaattgaatccagttataagtacgacgatagcaatattaattaatatatatacaatcatgatggactcctgttcgttatacttcaatcaactattatatcaattaatatattgttattcattagatatgacttgtaaaaagtaaaataagttatcctttatacaccttttttgttactccaaagtaatgtatgaagttgtggtaacacataaacgtgattcatatcattactttgcataactaaatccaccaactgctcgtagcgttctaacaacttttcggtatgattatctacgctgtctgataaatatgggttaccaacttgtaaatagaagggaatatctggataacggtggtgtatcattttggcaaaatcataatctttatcgtcgaatacaactacttttaagtttaatgaggaaggtacgcattgtgtaatcacttcatctaacttttttaaatcaggtgtcatagttgaacttggtggttttggactaatcgttaaatcatcaatttgtgtcatccaaggttggaatttactgccttgtgtctccagtgcgctgaaaatacctttatcttgaaataagtcaactaactcttggatacctttaattaatgctgggttaccaccagaaattgtaacgtgattaaataaatcgccaccaattcgttttaattcatcataaatttcttcagcggtcatgagttttatatcgcctttagcactaccatcccaagtaaatgcagaatcacaccagctacagcgataatcacatccagctgttctcacaaacatcgtttttctaccgattactcgaccttcaccctgaatggttggaccgaatatttcgagtacaggaattttagccattagttacacctgttcctttggtctaaatacaacataacttgttggtgtttctcttacaaatacttgaatacattttggttggtgttcgagcgatgccaaattttctttaacaatttgataaattgtttccgctacgatttcagttgaagggattttgtttttaaaagcaggtaagttatttaacagttgatggtcaaatttaccgtgtatcatctttttcaaatggctaaagttcactaagaagccagtgttatctagtttatcaccgacaattgttaaattaacaaagtaagtatgaccatggacattttgacaaatacctgcttcttcacaaggaatgtgatgtgcagctgaaaaattaaaatctttatttaattcgaattgatatggatgcgttgtactaggatagatttgttgtaacattttaaagcgctcctttactttcaagatattgatttagtccacgttgacgtaaatgacaagctggacattcaccacagccatccccaatgataccgttatagcatgttaatgtttttgtacgaatataatctaaaacttcgagttcatcacttaatttccacgtttctgctttgtttaaccacattaaaggagtatgaatgacaaaatctttgtccatagctaggcttaatgttacgttcattgattttataaaactatcacgacagtctgggtagcctgaaaagtctgtttcacatacgcctgtaataatatgcttagccccaatttgataagctagagcgcctgcaaacgacaagaaaagtaaatttctagctggaacaaatgtattaggtataccatcttcattattagtaatttccatatcatgttgtgttaatgcgtttggagtaagttgtgataataatgacatatctaaaacgtgatgtttcattccttgatcttgtgcaatttgttttgcgacttcaatttcagtatcatgtctttggccataattaaacgttacgagttcaacttctttgaaatgtttttttgcataaaagagacatgttgtactgtcttgaccaccactaaagacaacgatggctttttcattatttaatacactttccattttgtaattgctcctatcattaataatattaataaagaggttaatggcattgataagcccgtttttaatttataaaataaaaaaagcctatctccataaaagatagacgaaagaaatgggttgctcctataatatatattaaaggtttaccaacgaatgtttgaaatttcaatgtctagttttttatagagggtttcagctaggaacctctgatattcatttatgtacgatgaatagaatataccatatattagttaaaatcaaggtcaggataatgacaatgcttttaaagttttagctacatccaatacatattataaaaataaaacacatttagaacggagtatacaatgattctagtcatagataataatgattcatttacatataatttaatagactatattaagactcaaacgaaactaacagttcaagttgttggtattgataatctgctgatagaagacgtcattaatatgaagccaaaagcaattgttatttcacctgggccgggtaatccggatgattatcctatcttgaatgaagtgttagaacaattttatcagcgtgtacctatactaggtgtatgtttaggatttcaatgtatcgtgtcttattttggtggaaatatcattcacggctatcatcctgtacacggacatactacacagttacgccataccaatgaaggtatttttcaaggactgcctcaaaatttcaatgtaatgcgttatcattcattaattgctgacggagcgacttttccaaattgcttaaagattacagcgaaaaacgatgaagcgattattatggcatttgagcatattagatttccggtttttggtgtgcaatatcatcctgaatctattttgagtgaatacggttatcgacaagttgaattatttttatcgaaggtaggtgattactgtgagaatagaatataattatcgctactatttaactgaaaatgaatataagcaataccatattcaattaaagggatttataaagaagtatgttgctactaagttggctgatgtgggagaagtgatacactttgcacaagcgcagcaacgacaaggtagatatgtctcgttatatttaagttacgaagcggcaaagtattttaatcatgtcatgtgtacacattcattagctaaagatgatatttatgcagtagcttatagttttgaaaaagcggaaagcataaattcaacatatgaacatcaaacttcttatgtatcaaagcatcatttttcatttgttgaatcttctgaggttatgatgactaatattaaacgtgtccaacaagcaattgttgaaggcgaaacgtatcaagtgaactatacggcgcgcttaacagataacatttattatcctattagtactttatatgaacgattaactcaatttagtaatggtaattatactgcgttattacaaacagatgaaatccaagtagcgtctatctcaccagaattattttttcaaaaaggacagtttaacaatgtcgataacgttatcataagcaaaccgatgaaagggacaatgcctagaggtaaaacggaagctgaagatcaacagtattataaaacattgcaaacttcttcgaaagagcgtgcagaaaatgtcatgattgttgatttactaagaaacgatatagggagaatatcacagagtggctcaattaaggtgtataaactattttttattgaggcatataaaactgtatttcaaatgacttcgatggtaagtggaactttaaaaactaatacagacctaactcaaattttaacatcgttatttccttgtggttcgattacaggtgcaccgaaactgaatacaatgaaatatattaaacaattagaaagttcacctcgtggtatatactgcggaacaattggactattacttccaactgaagatgataaaatgatttttaatattccgattcgcactattgagtataaatatggacaagcgatttatggagtcggagcaggtattacaattgattctaagccaaaagatgaagtaaatgaattttacgcaaaaaccaagattttggagatgttataatgcaattatttgaaacaatgaaaattgataatggacatatccctagacttacttatcatactaatcgcataaaatgttcttctgagcgattaaactttaaatttgatgaacatgcatggcgaaatgaattaaacgatgtaacaacaaagtatcacagtggtcaatatagacttaaaatcgtattaaatgctgaaagcaaatttgaaacgatagtgtcacctttacctgagaaaagtagttttacagcaaaatttcaagtgttgcccaaagtagttaatccaacttttataaaaaataaaacgacagaacgaaagcatttagcacacaatcatgaaacagatttaatattgctaacttcagaggacggcaaggtccttgaatttgatattggcaacattgtcattgaagaggatggaaaatggtacacaccaagttataaagatgatttcttaaaaggatgcatgcgtgattatttaatagatagtgacaagcttgttgaaaaagactttaataaaaacgaattgatttataaatatcataacaatgagatacgtttatttttgataaatagtttacgagaggttgccgatgtccacctttgcctttaaaattagtatgataataatgtagaaaatgatgtgaaaacaaatttaaaaattaaatggggccaaatatgattattgtttatattgtgctgttgttaattcttgtatacgtaaattatcgattagtgaatcgattgctatctgaaaatagaatatatgttgttcgtttgatagcaacaattactactgttataagctttatccttgtatacgcattaattcacgaactcatgccttttgttgtgcgggcaatggatttaatgtatcaccagtaaatttagtgagtaggtaaaatgaactattcaatcgattctataattaaaaatcaaagtaaagtaaccaaatattgaagaggtgtacaaatgaaaatatatagtcaaggtgaccaagccattgtagtcgcaattgaaaaagaagtatctaaaagtttaaccgaagatttattaacacttcgctcatatttaattgaacaaaattatccatttattatagaaattgtgccatcagaatcagacatgatgattgtctatgacgcaagggatatgattaaacaccataatatacaatcaccttttttatacatgaaagcactaatagaatcgattcatttaaacataaaacatgattttaaccagcaagatttgattgaaataccaattgtgtatggttcgaaatatggtccggatttagaatcacttttaaaacattacaaaatcaagctagaaacttttattgaattacattctaaggcgcaatattttgtttcgatgatgggatattcacctgggtttccttatttaactggattaaataagaaattgtatattaatcacacgagtaaacagaaaaaattcattccagctggttctgtagtacttgaagggaaaaaatgcggtattgtaacaacggatacaattaatgattggttagttattggttatacaccattatcactttttaatccgaaagaatcagatttcgcacgcttaaagttaagcgataatattaaatttagacctatcaatgaaaatgaattagaagtaggagcgtttaaagatgtcaatcataattgaaaaaagtggcttattcagtagctttcaggactttggtagaaggggatatgaacatgatggtgtaattccatgtggtgcacttgatactttagcacatgaaattgctaatcgattagttgctaatgacaagaatgaagcaactttggaaatgactaataaaatggcaacgattcgttttacagaacctacgctgattgcattagcagggggtaatgtcaaagcttacactgagcatatgactatatctccatataaattgtatttgttagataaaggcgatgttttaaagtttagagaaacaagttatacatcgcgagtgtatttagctgtgggaggcggatttgaattagatgcatggttaggatctaactcaaccgactttaatgtaaaaattggtggttttaaaggtagaacattacaagatggcgatgaaataaagcttaagagagattatacagctcgtcatcataagttatttgaaaaccttgctcacacgaaacaaacagattggggtattgatggatacgccttgtcatttaattatatgtctgatgtatttcatgtcgttaaaaataaaggtacggaagattttaaagaagatgccattcaaagatttgtgaaacatgattataaagtaacgagcaaagcaaatcgcatgggaatgatgcttgaaggtgaaaaaatcaaagttttttatgaagatatgccgccgtatcagactgtcaaaaaaggaacgatacaaattaagcgtgatggcacacctattatcttattaaatgatcattatacgttaggtagctacccgcaaatcggtacaatcgcaagttatcatttaacgaaattagcacaaaaaccgcaaggatcacgtttgaaatttcaatttatagatattttaacggctgaaaagaaccttgttaagtatagtaactggttaaaccaattattccatggaatagaatatagaatgcaattagaaatgatgaaataatatttggtacgtagctcatactcgagtccgatgcaaataatttcctcctaatgtataatgaaataatactgtgttttatctgcgaaatgtatcatattctaattcgtttcacagtaaagtgaaaagataaagtgtgtttttacttgaattttgactaaaattactctatatttattaattgagctatgcttattattacaatttgattacaaattttaaatttgttaattgaatgataatattaaataaagaaacttacacaagcaaatatgagttgtagcccaaaatacttgttaaatcaaagttgaaagctacaaataatgaaaattataaacttgaatctgaaagtaattactataattatgacaatgttaacttttaaacgcacttattaattaactacataatgttaatatctaatttattcaagtactttcgcaagatttattatctaaataacgggggaaagaatcatgagttcacaaaaaaagaaaattagtctttttgcgttcttcttattaaccgtaataacgattaccttgaagacgtatttttcttattatgttgatttttctttaggtgttaaaggtttagtacaaaacttaatattattgatgaatccttatagtttagtagcactggttttaagtgtgttcctattctttaaaggcaaaaaagcattttggttcatgttcataggcggcttcttattgacgttcctattatatgccaatgttgtgtactttagattcttctcggattttttaacgtttagtactttaaaccaagtaggtaacgtagaatctatgggtggtgcggttagtgcatcattcaaatggtatgactttgtttatttcattgatacgttagtttacttattcattttaatatttaaaacaaaatggttagacacaaaagcatttagtaagaaatttgttcctgtcgtaatggcggcttcagtagcattattcttcttaaacttagcttttgctgaaactgacagaccagaattattaacacgtacatttgaccataaatatttagtgaaatatttaggaccgtataactttacagtatacgatggtgttaaaactatcgaaaataatcaacaaaaagcgttagcatctgaagatgacttaacaaaagtattaaattatacgaaacaacgtcaaacagagcctaatccagaatattatggggtggcaaagaagaaaaatattattaagattcatttagaaagtttccaaaccttcttaattaataaaaaggttaatggtaaagaagtaacaccgtttttaaacaaattatcaagtgggaaagagcaattcacatacttccctaactttttccatcaaacaggtcaaggtaaaacatctgactctgaatttacaatggataacagtttatacggtttaccgcaaggttctgccttttcattaaaaggagataatacgtatcagtcattaccagcaattttagatcaaaagcaaggctacaaatctgatgtcatgcacggtgactataaaacattctggaacagagaccaagtatataaacactttggtatcgataaattctatgatgcaacatactatgacatgtcagataaaaacgttgtaaacttaggcttgaaagacaaaattttctttaaagattctgctaattatcaagctaagatgaaatcaccattctattctcatttaattactttgactaaccactatccattcacattagatgaaaaggatgcaactattgagaagtcaaacacaggtgatgcaacagttgatggttatattcaaacagcgcgttatttagacgaagcattagaagaatatattaatgacttgaagaaaaaaggattatatgacaattcagtgattatgatttatggtgaccactatggtatctctgaaaaccataacaatgccatggaaaaactattaggtgaaaaaatcacaccagctaaatttacagatttaaacagaactggtttctggattaaaatccctggtaaatctggtggtatcaataatgaatatgctggtcaagtcgatgtaatgccaacaattttacatttggctggtatagatacgaagaattatttaatgttcggtactgatttattctctaaaggtcataatcaagtagttccattcagaaatggtgactttataacaaaagattataaatatgttaatggtaagatttattctaataaaaataatgaactcataactactcaaccagctgatttcgaaaagaataaaaagcaagttgaaaaggatctcgaaatgagtgacaacgtgcttaatggtgatttgtttagattctacaaaaatccagacttcaaaaaggtaaatccttcgaagtataaatatgaaacaggacctaaagcaaactctaaaaaataatatttaaacacgaactcggattgataaaatatcaatccgggttttattatgttcttttatattatgttttacattatatgtgttgataaaaaggtatattataaagatcattagcatagtcatcaaagccttatcaagttttatttatagttgaagcaacaatatattaaattatgacacttaacggtatcgatttcttttgatttcaaaaaggtgtataatgtatagaactgatttaagtacgtagagatttcaacagaagaaggaagatgggtatggaagcatataaaattgaacatttaaataaatcttatgccgataagactatattcgataacctagatttatcaatttcagaaggtgaaaaaataggtttggtgggcataaatggtacagggaaaagtacgttgttaaaagtaattggtggtattgatgatgattttacagccaatattatgcatccaaatcaatatcgaattcgatattcgtctcagaaacaggaccttaatgaagatatgacagtttttgatgcagtattaagttctgatacaacaactttacgcatcatcaagcaatatgagcaggcagtacaagcttatgcggatgaccaaagtgataaattgttcaagcgaatgatggatgcgcaagatgctatggatcaacatgatgcttgggactataatgctgaaattaaaacaatcctctcaaaactaggtatacatgatactactaaatacattaaagaattatccggcggacaacaaaaacgtgttgtacttgctaaaacattaatagaacaaccagatttattgttattagatgaacctacgaaccatttagacttcgaatcaatcagctggttgatcaattatgtgaagcaatatcctcatacagttttattcgtaacccatgatcgatattttttaaatgaagtttccactagaattattgaactaaacagaggtaagttagcgtcatatcctggtaactatgaatcttatattgaaatgcgcgctgaaagagaagtaacacttcaaaagcaacaacaaaagcaacgagctttatataaggaagaacttgcttggatgagggctggagctaaggctcgtactacaaagcaacaagctagaattaatcgatttaatgacctagaaaatgaagttaaccagcaatataaagacgataaaggtgaattgaatcttgcttattcaagattaggtaagcaagtgttcgaattagaagacttatcaaaggctattaatgataaagtattatttgaacatctgacggaaattattcaaaaaggtgagcgtattggtgttgttgggccaaatggagctggtaaaacaacactcttaaatattttgagtggagaagaccaacaattcgaaggtaaattgaagactggacagacggttaaagtagcttattttaagcaaacagatgagaccctggatagagatattcgtatgattgattatttaagagaagaaagtgagatcgcaaaagaaaaagatggaacctcggtatctattacacaacttcttgaacgatttttatttccaagtgcaactcatggtaaaaaagtttataaattatctggtggagagcaaaagcgtttgtatttattacgtctactcgtacaccagccaaatgttctgttgttagatgaaccgacaaatgatttagatactgagactttaacaatacttgaagattatattcatactttcggtggtacagtgattaccgtaagccatgatcgctactttttaaataaagttgcacagtcatattggtttattcatgatggtcagatggaaaagattatcggaacttttgaagattatgaaagttataaaaaatcattagataaaaataaatccacattgaagcaacaatctaaatcttctacaactgtacgtaagaaaaatggtttatcatataaagaaaagttagaatatgaacaattgatgaaacgcatagaacaagcggaagtaagaatggaagaaatagatgtgctcatgattgaggcaagtgcagattatgggaaaattaaagaattaaacgaagaaaaagaacaacttgaaattcaatatgatttagacatcacaagatggagtgagttagaagaaattaaagaacaacaataaggggtcaatttatgatgcaacaaacattatcgcattactttgggtatgaaacgtttcgaccaggacaagaagaaattattagcaaagtattagaccatcgtaatgtgcttggtgtcttaccaactggtggaggtaagtctatatgctatcaagtaccaggtttattgttaggtggtacaacaattgtaataagtccactaatatcattaatgaaagatcaagtggatcaattaaaagcgatgggaattcaagctgcttttttaaatagtagtttgactcaaaaagagcaacaacgtattgaaaaagcattatcaaatggagaaattcaatttttgtatgttgcaccagaacgatttgaaaaccgatattttttaaatatgcttcagcgtataaagattcacttagtcgcgtttgatgaagcgcattgtatttctaaatggggtcatgatttcaggccgagttaccaaaatgttatttcaaaagtatttacgttacctcaagattttacaataatagcgttgacagcaactgccacggttgaagtacagcaagatattagagaaaagttaaatatcgctcaaactgatcaaattaaaacgagtactaagcgtagaaacttaatttttaaagtaaatcctacttatcaacgtcaaaaatttatattggattatattaaaacacatgatgaagatgcaggtattatttattgttctacacgtaagcaagttgaagagcttcaagaagccttagaaagccagaaaattgaaagtgttatatatcatgcaggtttgagcaataaagaaagagaagaagcgcagaatgatttcttatttgatcgtgttaaagtagtcgttgctacaaatgcttttggtatgggtattgataaatccaatgtacgttttgttattcattataatatgcctggagatttagaatcttattatcaagaagcaggtcgtgcaggtcgtgacgggttgaaaagtgaatgtattttgttatttagcgaacgcgatatcaatttacacgagtattttataacagtctctcaagctgatgatgactataaagataaaatgggcgaaaagttaactaaaatgattcaatatacaaaaacaaaaaaatgtctagaagcaacaattgtccattattttgaaccgaatgaaaaattagaagaatgtgaacaatgtagtaattgtgttcaacaagataaatcatataatatgacacaagaagctaagatgattattagttgcatcgctcgtatgaaacaacaagagagttatagtgttatcattcaagtgctaagaggagagtcaacagattatattaagtacaaaggttatgatcaaatttcaacccatggtttaatgaaaggttacacaacatcagaattaagtcacttaatagatgaattaagattcaaagggttcttaaatgaaaatgatgaaatattaatgtgtgatacttcaattaaaaaattactcagtaatgaagtagaagtattcacaacaccatttaagcaaaaagcgactgaaaaagtatttataaatacggttgaaggggttgaccgagtattattcagtcagttggtagaagttcgtaaaaagttaagtgacaaattaacgatagcacctgtaagtatattttctgattacacgttggaggaatttgctaaacgtaagcctgcttcgaaacaagatatgattaatattgatggcgtaggtagttacaaattaaaacattattgtccagcatttttagaaacgattcaaaattataaagccaaagtatagtgaaggcacctagtaagcattccttgttttactgggtgtttttttgaattcaaggtaaaataacactatttcttaactggagattacctattattcattattttgttaaaaaagttcaaggataaatcatttaaatttgaaaattgtaataaacgtggttaaatagggaatacatacatataatctcggttttatgctatgagaaaaaaagaggtggcaaagtgattaagtttaaaaatgtaactaagcgttatggcaaacatgttgctgtcgataacattagtttcaatattaatgagggtgaattttttgtactaattggaccttcaggttgtggaaaaactacgacattaaaaatgattaatcgactcattcacttaagtgaaggttatatttattttaaagataaaccaataagtgattatccagtatacgaaatgcgttgggatattggatacgtattgcagcaaattgcattattcccacatatgacaatcaaagaaaatattgcacaagtgccacaaatgaaaaagtggaaagaaaaagatatagataaaagagtagatgaattacttgaaatggttggattagaacctgaaaaatataaaaacagaaaacctgatgaattgtcaggggggcaacgacaacgtgtaggagttatacgtgcgttagcagctgatccaccagttattttaatggatgaaccgtttagtgcattagacccaatcagccgagaaaaacttcaagatgatttaattgaattacaaactaaaattaagaagacaatcatatttgttacacatgatattcaagaggcgatgaaacttggtgataagatttgtcttttgaatgaagggcatattgaacaaattgacacaccagaaggatttaaaaataatcctcaaagtgaatttgttaaacaatttatgggtagtcatttagaagatgatgcgccatgtgttgaagagaacgcaattatccgtgacttggatattatgaaaccaatcgatgaggttacatctatgagcgcttatccaattgtttatgacaatcaaccaattgaagtattgtatcaacttttatcagagagagagcgtgtcattgtcatgcaagaagatagcgtaggtcaatatgttattgataggaaagatatcttcaaatatttgtcccagaaaaaggaggtagctcaacatgactaactttttcgacatattgagtgaacgtaaggggcaactcttttcgacaatgatagaacatattcaaatatcatttatcgcattattgattgcaactgctattgcggtaccattaggtattttattaacgaagactaaaacgatatctgaaatcgtaatgaatattgcggcaattcttcaaaccataccatcgttggcattattaggtttaatgattcctttatttggtatcggtcgtgtgccagcaattattgcacttgtagtgtatgcgttgttaccaattttaaggaatacgtatactggaattaaagaagttgatccatcactcattgaagcggctaaaggtataggtatgaaaccatttagacgtttaactaaagtcgaacttccgatagcaatgcctgttataatggctggtgtaagaacggctatggtattaattataggtacagcaacactagcagcattaattggtgcaggcggactaggagatttaattttattaggtatagaccgtaacaatgcatcgttgatattattaggtgcaattccagcagccttattggcaattatatttgatttaattttaagatttatggctaaattatcttataaaaagttattgatgacgttaggtgttatagtgatgattattatactggctatcgctattcctatgtttgcacaaaaaggtgataaaattacgttagctggaaagcttggctccgagccatcgattattacaaatatgtataaaattttaatagaagaagagaccaaaaatactgtagaagtgaaagatggtatgggcaaaacggcatttttatttaatgctttaaaatctgacgatatagatgggtatttagaatttactggaacagttttaggtgaattaacaaaagaaccattgaagtcaaaagaagagaaaaaagtttatgaacaagctaagcaaagtcttgaaaagaaatatcaaatgactatgttaaaaccaatgaagtataacaatacgtatgctttagctgtaaaacgtgattttgctaaacaacataatatacgtacaattggtgatttaaataaggttaaagatcaacttaaaccaggatttacattggaatttaatgatcgtccagatggttacaaagctgttcaaaaggcttataatttaaatttagataacatacgtacaatggaacctaagttgagatatcaagcgatcaataaaggtaatattaatttaatagatgcatattcaactgacgctgaattaaaacaatatgatatggttgtgttaaaagatgataagcacgtatttccaccatatcaaggagcaccattatttaaagaaagctttttaaagaaacatccagaaattaagaaaccgttaaacaaactagaaaacaaaatatctgatgaagatatgcaaatgatgaactataaagtaacagttaaaaatgaagacccatatacagttgcgaaagattatttaaaagcaaaagggttaatcaaataacgaccaacgccacataagatgcgtaacaccaaattatatcttatgtggcgttgttatatttaaatctataattatgttcaatttaaacatgcaataatgattaaaaaatatgacatgttaaacacaatgtaagctattatgatgtgaaaatagtagcattgcattttagaaacatagagcgatataatgaatataagttttttaaaatttcagttaattctaaggaggttgtttttattatgaaagaacaacttaatcaactatcagcatatcagcctggtttatctccaagggcattgaaagaaaagtatggcattgaaggagatttatataaacttgcatcaaatgaaaatttgtatggaccatcgcctaaagttaaagaagcgatatcagcacacttagatgagttatattattatcctgaaacaggatcaccgacattaaaagcggcgattagtaaacatttaaatgtagatcaatcacgcattttatttggtgcgggattagatgaagttatattaatgatttctagagctgtattaacgccaggggatactattgttacaagtgaagcgacattcggtcaatattatcacaatgcgattgttgaatcagctaatgtgatacaagtacctttaaaagatggtggcttcgatttagaaggtattttaaaagaagttaatgaagatacgtcattggtatggttatgtaatccaaataatcctacaggtacatattttaatcatgagagcttagattcgtttttatctcaagtacctccacatgtaccagtaattatagatgaagcttattttgaatttgtgacagcagaggactacccggatacacttgctttgcaacaaaaatatgacaatgctttcttattacgtacattttcaaaggcgtatggattagcgggtttacgtgtaggatatgtggtagcaagtgaacatgcgattgaaaaatggaacatcattagaccaccatttaatgtgacacgtatatctgaatacgcagcagttgcagcacttgaagatcaacaatatttaaaagaggtaacacataaaaatagtgttgaacgcgaaagattttatcaattacctcaaagtgagtatttcttgccaagtcaaacgaattttatatttgtaaaaacaaagcgggtaaatgaactttatgaagcacttttaaatgtagggtgtattacgcgaccatttccaactggtgttagaattacaattggttttaaagaacaaaatgataaaatgttagaagttttatcaaactttaaatacgaatagtaagtggggagtgggacagaaatgatattttcgcaaaatttatttcgtcgtcccaccccggcaaggttgactagaattgaaaaaagcttgttacaagcgcattttcgttcagtcaactactgccaatataactttgtagagcattgaacattgatttatgtctcaagctcaatgcagtgtgaatgatgaggtgagagtattcagtgtaaaaagcaacaatagatgatattgttttgtatcaattgcttttttgctatactgaatcaatactgatattttgaggagaagattaaaatgacccgtaaatcaatcgcgattgatatggatgaagtattggcagatacattaggagaaatcattgatgctgtcaattttagagcggatttaggtattaaaatggaagctttgaatggtcaaaaacttaaacatgttattcctgaacatgatggattaattacagaagtattgagagaaccaggcttcttcagacatcttaaagtgatgccgtatgcacaagaagttgtgaaaaaattaactgaacattatgatgtatatattgctacagcagcaatggatgtaccaacatcatttagtgataaatatgaatggttactagagttctttccatttttagatcctcagcattttgttttttgtggtagaaaaaacatcgttaaagctgattatttaatagatgacaatcctagacagcttgaaatttttactggtacaccgattatgtttacagcagtgcataatattaatgatgatcgatttgaacgcgtaaatagctggaaagatgtagaacagtattttttagataatattgagaaataaaatatatcacttgaaaaatttcatgtagaaaagatgatggataggctataaagtaattgtgactgagatgaacttttatgtcttagacactacaacactatattggcagtagttgactgcggggccccaacatagagaaattggaacgccaatttctacagacaatgcaagttggggtgggccccaacataaagaaatactttttctttagaaattagtatttcttatgcatgagtgtaactcatgcattcatatttttaagtacacattagctgtgactaatgataaagaatcgctacataatcaatcattagtcgttctttatcatttccgtcccgctctcaataaatgttagtctatcttattattataaatcggatgaatgtgttaatctatggcagattacacgtcatccgattttttatagaatttgaaaaagacgcataaaccactatgatttaaaatacaacatcaatcattttagtggcatgcgccaaaattatatgtctgtttttgaaacagggtaatagcttaaagctaataaaaacgaatataaggtgcgttgaatcttatgattacactccaaacctaatataatatcgggttaagatcattccggatgcttacaaatcattgacagtaagtaactgaatggcatttggtataacctcaatatcaataggtgtttctaatgaaatttcgccatcaatatcaactttcattgctggatctgttgtaagtgaaatctttttaccaggtatatgctcaataccttgagtaatttcattccaattcatgctatcacgctttttaaaaatatcatttaaaatactgaaactttgttcattaaaaatgaaagtgttcagttcaccatcttgaggagacaaatcagtcaatggtatacgactaccaccaatgaatggaccatttgctgttagtatcatggtcgtttcgccagaatatgtcttatcatctattgataattgataattaaattgtgttggatttagcagtgttttgacagttgatccaatataactcaatttaccaaatatatcttttgaaccatcttgtacgttttcagcgttttgaacaatgagacctaagccaacaaagttgagtgcatattgattatttattttaattacatcgtatttaccaacttgtgcagaaatcatttgttcactagcttgtttatgattaggtgctatatttagcgtttttgtaaaatcattaaaagtaccgcctggtaaaatgccaatagggagttgaaggtcatgtgtcataacaccgtttataagttcgttaaccgtgccatcaccgccaagaataaataatatatctacatcttttgcatagtttttagttttgatttcttggcaatatttaataatgtcaccttcgttttcactcaattgaatagaaagatgcttacaaattgaacttaatgctgttgtaacttccccaataccttgattaatattttttaatccactgtgttcatggtaaaagaggacaccatgtgtatatttattttccatagtttagcctactttctaaaaattggttcattaaatatatatacccacttttaattgttaataccaaaaatatgttttaaatagagaaaatggtaataactgacattgatgtctatagagtgggacgagaaaatatagttatagctgtctataacgagcatattaagcttttatttatactgatatcttgaatttaattaatagaaacctataaaaaaacagtaagtcatttaaatgacttactgttttttaatttaggccaacaatattaacgaatacctttcattgctttaataattaaaggtgagaatgctaatacaattgttgtaacaataattgcaacaacacctaggaaaataaagtaatttgtttgacctagtggttctattaacttaactaaagtaccattgattgcttgtgcagaagcgttagttaagtaccaaatactcatcatttgggcattaaatgctttaggtgctaacttaacagcagcactattacccgttggtgataagcatagctcaccgataacacaaataatgtacgataaaataacccagttaactgaaaagtttgatgaacctgatgcataacctacaataccaattagtatgtatgacgcacctgctaagaacgtaccaattgcaaatttcactggcaggctaggttgtttagttccaagcttttgccataaaagtgaaataattggagctaataataaaataaataatgggttaattgattggaagatcgcttcaccaaagtttgttttccaaccaaataagtttaatttcatatctgaatgttcaattccataaatgtttaatacattagacccttgttcttgaatagcccagaacaccattccaagaataaataatggaataaatgctttaacacgagaacgttcagtatcagtgacatctttacttctaataattaaagtgaagtaaatgattggtaatgcaatacctaatactaaaacagtattactaactaagttaaatgataatgaattagttaatgcaccaataacgataattaatacaattgctaagacaacacttccgataataagaccatactttttcttttcagctggtgtcaatgggttagtaggtttcataccaacgctacctaagtttttgcggttgaaaagtacataccatactaaacctaatgccataccaactgctgcaatcaagaatccgccgtggaagtttttaacattaacaaagtgttgcaaaataataggtgataataatgcacccatattaactgacatatagaaaataacaaaacctgcatccatacgtctatcattttcaggatataaacggccaacgatatttgaaatgtttggcttcattaaacctgaaccaataatgatgaagaacattgatgtgaataagccgattaatgcaaatggtaagcttaaacaaatatgtccgataataataaagactgcacctaataaagtagcacctctagtacctgtaattctgtcagcaatccatccgcctggtattgatgtcatatagattaatgaaccataaactgacataattgacatagctgttgttttatcaattccaaggccattatctgttacggcaaagtacatgtagaaaatgagtagggcacgcatgccataataactaaacctttcccagaactctacaaagaagagtacgcctagtcctcgaggatgcccgaaaaatcctgtttgaggtatgtcttgaatttgatttccatgggagttttgttgtgtcatgtatacatcccatcctttcttcccctaatacaatagtttaagtaaatttgattgtgccttatcaactaaatatcccaacaaatcacaaaaaaataaaaatattgagaatattctgttattaagcgcgcacaattaattagagataatataaaaatatacttattgacgttaaagtgcaataggtttctataaaaatgttgtttaattcgtgtactaatattcttttggtgtactttggtataaaatgttattttaatgtaacctattatgtatgctaaatgaaaaacacaccaataagttaggaaaatcaacttattggtgtgtttattaaatgatacatttaacgattatctattttttcgggatataaatcatgattcatcaaacgatgctcagccattttttcatatttagaatttggacgtccatagtttgtataaggatcaatagaaattccaccacgtggtgtgaacttgccccagacttcaatataatgtgggtccataagctctatcaaatcattcataataatattcatacaatcttcgtgaaaatcaccgtgatttctgaaactaaataagtataatttcaaagattttgattcaaccattttaacatttggaatatatgaaatatagatagttgcaaaatctggttgcccagtaattggacataatgatgtaaattctggacagttgaattttacgaaatagtcacgaccttgatgcttattatcaaacgattctaatacatcaggacgatagtcaaaattgtaagtattgtcttgatttcctaataaagttatatcttgtaattcatctttttgacggccatgtgccatataaagcgctcctttaaatttatttttttattattttggcgtctcggcgtgctttttcaaacatgtaataacttgcaccgataataacgacgtaacctaatgttgcatagaaatctggagattctccgaatagaataaatccaagtattgctgtgaaaattatagatgcatacgtgaaaatagaaatatcttttgctgctgcaaaactatatgctaatgtaacaccaatttgacccacagcggcagctaagccagcccctaatagataaagtatttgcatctgactcattggttcataggtatatgcagtgaaaggtattaaaacgatgacagaaaataaggagaagtaaaatactatagtatatggtgcttctcttgtactaagtgctcgaacacatgtatatgctgatgctgcaaaaatacctgagaataagccagctaatgatggaatcatagatgatgaaaattcaggtttcactattaaaagcatacctaaaatagcaattatcattgctgtaatttgatacttccttaccttttcatgtaagaaaacaatgcttaataaaatcgtccagaaaggattgagtttcattaatgaatcggcatcactaagtaccatatgatcaatggcataaatatttaacaatacaccaataagtccaagtgttgatcgtgttattaataagggttgacttgaaagtctgccaaacattggctgatggtatttatatataaaaaataatggaataaacattgctactatgtttcgtgctaatgatttttgaaaaacaggaaggtcacctgcaagtctgaaaaacactgacataaaactgaaaccaatagccgaaattaaaatggcaatgataccttttactttaggattcaattttatcgcctcttttatataaaattaacgtatttatattagcataaaacaacatgttgtgcataaatagttgaaatttactataaaaagactataatagtctgtaccgaacaaatgttctgtgtttatttgtcggaataatagggcattacacttttatgaatgtttgtgttattacataaaacaaatatcaattcagtatcaagctaataagctttttcttgatttctgttgatacaattgagattgacacagatttaaaaaaatcaagtgatatctactaaaaaatttttttaaatttgttcaagtttttctaatttagtattggtgcctagttggaacgttttacgaacattcgattagaaaatggcactttaaatcatagtgtgtcttatgtataatgaaacacataatatagtgttggtgaaacgaaaaagacacaatatcttgtgttttgtatgcaaatgctttatttatgaagaaattacatttaaaagtaatttaacacagaaatttaacacagaaatttaatagttattatcaattaatagtcatatttttagaaaatgtactgagcaaatggaagatatccaatgatgtaaacactacatatagtgatttttatacattcaacccatataagctactattttctcaaatataaatctatgcaattggtttacatttgagaaaataagtagcttcattatagttaatacaatgctgagataaccatagtaaccatgttgttaaagcattttttaattggaatgactactttatttaaaagggttgaagaaagaaggtgatccaatgaaaataatatatttttcatttactggaaatgtccgtcgttttattaagagaacagaacttgaaaatacgcttgagattacagcagaaaattgtatggaaccagttcatgaaccgtttattatcgttactggcactattggatttggagaagtaccagaacccgttcaatcttttttagaagttaatcatcaatacatcagaggtgtggcagctagcggtaatcgaaattggggactaaatttcgcaaaagcgggtcgcacgatatcagaagagtataatgtccctttattaatgaagtttgagttacatggaaaaaacaaagacgttattgaatttaagaacaaggtgggtaattttaatgaaaaccatggaagagaaaaagtacaatcatattgaattaaataatgaggtcactaaacgaagagaagatggattctttagtttagaaaaagaccaagaagctttagtagcttatttagaagaagtaaaagacaaaacaatcttcttcgatactgaaatcgagcgtttacgttatttagtagacaacgatttttatttcaatgtgtttgatatttatagtgaagcggatctaattgaaatcactgattatgcaaaatcaatcccgtttaattttgcaagttatatgtcagctagtaaatttttcaaagattacgctttgaaaacaaatgataaaagtcaatacttagaagactataatcaacacgttgccattgttgctttatacctagcaaatggtaataaagcacaagctaaacaatttatttctgctatggttgaacaaagatatcaaccagcgacaccaacatttttaaacgcaggccgtgcgcgtcgtggtgagctagtgtcatgtttcttattagaagtggatgacagcttaaattcaattaactttattgattcaactgcaaaacaattaagtaaaattggtggcggcgtagcaattaacttatctaaattgcgtgcacgtggtgaagcgattaaaggaattaaaggcgtagcgaaaggcgttttacctattgctaagtcacttgaaggtggctttagctatgcagatcaacttggtcaacgccctggtgctggtgctgtgtacttaaatatcttccattatgatgtagaagaatttttagatactaaaaaagtaaatgcggatgaagatttacgtttatctacaatatcaactggtttaattgttccatctaaattcttcgatttagctaaagaaggtaaggacttttatatgtttgcacctcatacagttaaagaagaatatggtgtgacattagacgatatcgatttagaaaaatattatgatgacatggttgcaaacccaaatgttgagaaaaagaaaaagaatgcgcgtgaaatgttgaatttaattgcgcaaacacaattacaatcaggttatccatatttaatgtttaaagataatgctaacagagtgcatccgaattcaaacatcggacaaattaaaatgagtaacttatgtacggaaattttccaactacaagaaacttcaattattaatgactatggtattgaagacgaaattaaacgtgatatttcttgtaacttgggctcattaaatattgttaatgtaatggaaagcggaaaattcagagattcagttcactctggtatggacgcattaactgttgtgagtgatgtagcaaatattcaaaatgcaccaggagttagaaaagctaacagtgaattacattcagttggtcttggtgtgatgaatttacacggttacctagcaaaaaataaaattggttatgagtcagaagaagcaaaagattttgcaaatatcttctttatgatgatgaatttctactcaatcgaacgttcaatggaaatcgctaaagagcgtggtatcaaatatcaagactttgaaaagtctgattatgctaatggcaaatatttcgagttctatacaactcaagaatttgaacctcaattcgaaaaagtacgtgaattattcgatggtatggctattcctacttctgaggattggaagaaactacaacaagatgttgaacaatatggtttatatcatgcatatagattagcaattgctccaacacaaagtatttcttatgttcaaaatgcaacaagttctgtaatgccaatcgttgaccaaattgaacgtcgtacttatggtaatgcggaaacattttaccctatgccattcttatcaccacaaacaatgtggtactacaaatcagcattcaatactgatcagatgaaattaatcgatttaattgcgacaattcaaacgcatattgaccaaggtatctcaacgatcctttatgttaattctgaaatttctacacgtgagttagcaagattatatgtatatgcgcactataaaggattaaaatcactttactatactagaaataaattattaagtgtagaagaatgtacaagttgttctatctaacaattaaatgttgaaaatgacaaacagctaatcatctggtctgaattagcagatgattagactgctatgtctgtatttgtcaattattgagtaacattacaggaggaaattatattcatgatagctgttaattggaacacacaagaagatatgacgaatatgttttggagacaaaatatatctcaaatgtgggttgaaacagaatttaaagtatcaaaagacattgcaagttggaagactttatctgaagctgaacaagacacatttaaaaaagcattagctggtttaacaggcttagatacacatcaagcagatgatggcatgcctttagttatgctacatacgactgacttaaggaaaaaagcagtttattcatttatggcgatgatggagcaaatacacgcgaaaagctattcacatattttcacaacactattaccatctagtgaaacaaactacctattagatgaatgggttttagaggaaccccatttaaaatataaatctgataaaattgttgctaattatcacaaactttggggtaaagaagcttcgatatacgaccaatatatggccagagttacgagtgtatttttagaaacattcttattcttctcaggtttctattatccactatatcttgctggtcaagggaaaatgacgacatcaggtgaaatcattcgtaaaattcttttagatgaatctattcatggtgtatttaccggtttagatgcacagcatttacgaaatgaactatctgaaagtgagaaacaaaaagcagatcaagaaatgtataaattgctaaatgacttgtatttaaatgaagagtcatacacaaaaatgttatacgatgatcttggaatcactgaagatgtgctaaactatgttaaatataatggaaacaaagcactttcaaacttaggctttgaaccttattttgaggaacgtgaatttaacccaatcattgagaatgccttagatacaacaactaaaaaccatgacttcttctcagtaaaaggtgatggttatgtattagcattaaacgtagaagcattacaagatgatgactttgtatttgacaacaaataacaattaaattaaaagaccttcacatgtaaagggaaatagcgattcgtttcgtcttgcctcctacatgttgaaggtcttttctctatgcttaaaagcgtatgcatattttgaaaaagtaaaaattgtatttaatgatgtcaatgaggctagaaagtatacaagatattgcattacaaaagggtgttctattttactttaagcaaacaaaatacacattccgaaaaattaaatttcagtttaattgcaaatatcaataaaattgacactaaattatttgaaaggctattgaaattatggtcaaaaaacgctactattaatgagaaatattatcaatgataatgattatcattaatttaaagggagaaaaatttgtaatgaagtatttattaaagggaaatattttgcttctattactaatattgttgacaattatttcgttgttcataggtgtgagtgaactatcaattaaagatttactacatttaactgagtcacagcggaatattttattctcaagccgaataccaaggacgatgagtattttaattgctggaagttcgttggctttagcaggcttgataatgcaacaaatgatgcaaaataagtttgttagtccgactacagctggaacgatggaatgggctaaactaggtattttaattgctttattgttctttccaaccggtcatattttattaaaactagtatttgctgttatttgcagtatttgcggtacgtttttatttgttaaaatcattgattttataaaagtgaaagatgtcatttttgtaccgcttctaggaattatgatgggtgggattgttgcaagtttcacaaccttcatctcattgcgcacgaatgctgttcaaagcattggtaactggcttaacgggaactttgccattatcacaagtggacgctatgaaattttatatttaagtattcctcttttagcattgacatatctttttgctaatcatttcacgattgtaggaatgggtaaagactttactaataatttaggtttgagttacgaaaaattaattaacatcgcattgtttattactgcaactattacagcattggtagtggtgactgttggaacattaccgttcttaggactagtaataccaaatattatttcaatttatcgaggtgatcatttgaaaaatgctatccctcatacgatgatgttaggtgccatctttgtattattttctgatatagttggcagaattgttgtttatccatatgaaataaatattggtttaacaataggtgtatttggaacaatcattttccttatcttgcttatgaaaggtaggaaaaattatgcgcaacaataataaaaaaataatgcttttaattgcagtaacgttattaattagtatgctgtacttatttgtaggtattgattttgaaatatttgaatatcaattttcaagtcgtttaagaaagttcatattaattattttagtaggtgctgccattgcaacttcagtggtgatatttcaagcgattacaaataaccgtctattgacaccatcaataatggggttagatgcagtttatttatttatcaaagtattgccagtctttttatttggaattcaatcggtatgggttactaatgtatatttgaactttatattaacacttataacgatggtgttattcgcactaatcctattccaaggtatctttaaaattggacatttttcaatttattttatcttacttattggtgtccttttaggaacattttttagaagcataacaggttttattcaactgattatggatcctgagtcatttttagcaatacaaagtagtatgtttgctaattttaatgcttctaattcgaatttagttactttctcagcagtgctattagtaatcttattagtcattacaattttactattgccttatttagatgtattgcttttaggtcgtgctgaagcaattaatcttgggatatcgtatgaaaaattaacgcgaattctacttgtaatagtctcagttttagtttctgtgtcaactgcattagtaggaccaattacatttttaggtttattaactgtaaatctagcgcatgaactaatgaagacgtatgaacataagtatattttaattgcgacaatttgcttgagttggattagtttatttagtgcgcaatgggtagttgaaaatgtgtttgaagctacgacagaaatgagtatacttattgatttgattggtggaagttatttcatttatctattagttagaaggagaaatgcgcaatgattcaagttgaaaatttaactaaaactataaataatcaaatgatattggaagatattagcatagatatcgaaaaaggtaaattgacttctttaattggacctaatggtgcgggtaagagtactttactttcagcgatatgtaggttaattcgttttgataacggtgaagtgaaaatagatggacagctcatgtctgattataaaaataatgacttgtcgaaaaaaatatctatattaaaacaaacaaaccatactgaaatgaatattacggtagagcagttggtaaactttggacgattcccttattctaaaggtcgtttgacgaaagaggatcatgatattgtcaatgatgcgctagatttgttgcaactacaagatatcagaaatcgtaatattaagtcattatctggtggacaacgtcagcgtgcatacattgcaatgacaatagcacaagatactgaatatattttgctagatgaaccattaaataatttagatatgaagcatgctgttcaaattatgcaaacgttaaaaatgttagcgcataaaatgaataaagcgattgtcattgtgttacatgatattaactttgcgtcctgttattcagatcagattgtagcattgaaaaacggacaactagttaagtcagatttgaaagataatgtcattcaaagtagtgttttaagtgatttatatgacatgaatattcaaattgaacatataagaaatcaaaggatttgtttatattttaaggattgataatttggagacactttaaaggggtgatgcgccaattaaagaagggttaaacgtaaagcatttatttatatttcacatcaagcacacagattaagccaaaagaggagaatattatattatgaagaaaacagtcttatatttagtattagcagtaatgtttttattagcggcatgcggtaacaattctgataaagaacaatcaaaatcagaaactaaaggttctaaagatacagtgaaaattgaaaataactataaaatgcgtggcgagaaaaaagatggtagtgacgctaaaaaagttaaagaaactgttgaagtaccaaaaaatcctaaaaatgcagttgtgttagactatggcgcattagatgtaatgaaagaaatgggcttatcagataaagtaaaagcattacctaaaggggaaggcggtaagtcattaccgaatttcttagaatcatttaaagatgataaatatacaaacgttggtaatttaaaagaagtgaattttgataaaattgctgcgacgaaacccgaagtaatctttatctctggacgtacagctaatcaaaagaatttagatgaattcaaaaaagctgcacctaaagcgaaaattgtttatgttggtgcagatgaaaagaacttaattggttcaatgaaacaaaacactgaaaatatcggtaaaatttacgataaagaagataaagctaaagaattaaataaagatttagataacaaaattgcttcaatgaaagataaaacgaaaaacttcaataaaactgttatgtatttactagttaacgaaggtgaattatcaacatttggacctaaaggtcgttttggtggattagtttacgatacattaggattcaatgcagttgataaaaaagtaagtaatagcaatcatggacaaaatgtttctaacgaatatgttaataaagaaaatccagatgttattttagcgatggatagaggtcaagcgataagtggtaaatcaactgcgaaacaagcattaaataatcctgtattaaaaaatgttaaagcaattaaagaagacaaagtatataatttagatcctaaattatggtactttgcagctggatcaactacaactacaattaaacaaattgaggaacttgataaagttgtaaaataattttaaaagaggggaacaatggttaaaggtcttaatcattgctcccctcttttctttaaaaaaggaaatctgggacgtcaatcaatgtcctagactctaaaatgttctgttgtcagtcgttggttgaatgaacatgtacttgtaacaagttcatttcaataccagtgggctccaaacatagagaaatttgattttcaatttctactgacaatgcaagttggcggggcccaaacatagagaatttcaaaaaggaattctacagaagtggtgctttatcatgtctgacccactccctataatgttttgactatgttgtttaaatttcaaaataaatatgatagtgatatttacagcgattgttaaaccgagattggcaatttggacaacgctctaccatcatatattcattgattgttaattcgtgtttgcatacaccgcataagattgctttttcgttaaatgaaggctcagaccaacgcttaatggcgtgcttttcaaactcattatggcacttatagcatggatagtatttattacaacatttaaatttaatagcaataatatcttcttcggtaaaataatggcgacagcgtgtttcagtatcgattaatgaaccataaactttaggcatagacaaagctccttaacttacgattcctttggatgttcaccaataatgcgaacttcacgatttaattcaatgccaaatttttctttgacggtcttttgtacataatgaataaggttttcataatctgtagcagttccattgtctacatttaccataaaaccagcgtgtttagttgaaacttcaacgccgccaatacggtgaccttgcaaattagaatcttgtatcaatttacctgcaaaatgaccaggcggtctttggaatacactaccacatgaaggatactctaaaggttgtttagattctctacgttctgttaaatcatccattttagcttgtatttcagtcattttaccaggagctaaagtaaatgcagcttctaatacaactaagtgttctttttgaataatgctattacgataatctaactctaattcttttgttgtaagtttaattaacgagccttgttcgtttacgcaaagcgcatagtctatacaatctttaacttcgccaccataagcgccagcattcatatacactgcaccaccgattgaacctggaataccacatgcaaattcaaggccagtaagtgcgtaatcacgagcaacacgtgagacatcaataattgcagcgccgctaccggctattatcgcatcatcagatacttcgatatgatctagtgataataaactaattacaatgccacgaataccaccttcacggataataatatttgagccatttcctaaatatgtaacaggaatctcattttgataggcatatttaacaactgcttgtacttcttcatttttagtaggggtaatataaaagtcggcattaccacctgttttagtataagtgtatcgttttaaaggttcatcaactttaattttttcatttgggataagttgttgtaaagcttgatagatgtctttatttatcacttctcagtacatcctttctcatgtctttaatatcatatagtattataccaattttaaaattcatttgcgaaaattgaaaagaaagtattagaattagtataattataaaatacggaattattgtcgttataagtattttttacatagtttttcaaagtattgttgcttttgcatctcatattgtctaattgttaagctatgttgcaatatttggtgcttttttgtatggaattgcaaagcaatatcatcattagttgataagaggtaatcaagtgcaagataagattcaaatgtttgggtattcatttgaatgatatgtagacgcacctgttgttttagttcatgaaaattgttaaacttcgccatcataactttcttattatatttatgatgcaagcgataaaacccaacataatttaaacgtttttcatctaaggaagtaatatcatgcaaattttctacacctactaaaatatctaaaatcggctctgttgaatatttaaaatgatgcgtaccgccaatatgttttgtatattttactgggctgtctaagaggttgaataataatgattcaatttcagtgtattgtgattgaaaacaattagttaaatcactattaatgaatggttgaacatttgaatacatgataaactcctttgatattgaaatttaatttaatcacgataaagtctggaatactataacataattcattttcataataaacatgtttttgtataatgaatctgttaaggagtgcaatcatgaaaaaaattgttattatcgctgttttagcgattttatttgtagtaataagtgcttgtggtaataaagaaaaagaggcacaacatcaatttactaagcaatttaaagatgttgagcaaaaacaaaaagaattacaacatgtcatggataatatacatttgaaagaaattgatcatctaagtaaaactgatacaactgataaaaatagtaaagaatttaaggcactacaagaagatgttaaaaaccatctcatacctaaatttgaagcatattataagtcagcaaaaaatttgcctgatgatacaatgaaagttaagaaattaaaaaaagaatatatgacgcttgcaaatgagaagaaggatgcgatatatcaattaaaaaaattcataggtttatgtaatcaatctatcaagtataacgaagacattttagattatacgaaacaatttgaaaaaaatagatacaaagttgaatcagaaattaaattagctgataataaaagtgaagcaactaatcttacgacaaaattagaacataataataaagcgttaagagatactgcgaagaagaacctagatgatagtaaagaaaatgaagtaaaaggcgcgattaaaaatcacattatgccaatgattgaaaaacaaattaccgatattaaccaaactaatattagtgataagcatgttaataatgcaaggaaaaacgcaatagaaatgtattacagtctgcagaactattataatacacgtattgaaacaataaaggttagtgagaagttatcaaaagtcgatgtagataagttgccgaaaaagggtatagatataactcacggcgataaagcctttgaaaaaaagcttgaaaaattagaagaaaaataactataatcatttttcaaagttaaaaattttgaatttatggttaacatgtcaacttactatgtgtataatggtaaacattgatattaactatatgtataaaaatgtcacgcagatgctatttaaatgtgataaatatttttagaggtgaatagagtggctataaagctaagttcaattgaccaatttgaacaggttattgaggaaaataaatatgtttttgtattaaaacatagtgaaacttgtccaatatcggcaaatgcgtacgatcaatttaataaatttttatatgaacgcgatatggacggttattatttgattgtccaacaagaacgcgatttgtcagattatattgctaaaaaaacgaacgttaaacatgaatcacctcaagcattttattttgtaaatggtgaaatggtttggaatcgagaccacggtgatatcaatgtgtcgtcattagcacaagcagaagaataatgaaactatagggttggaacattttgccttacactactagacgtgaatagcacaacttaaattcgtgtgaatcagagtagtttggctataatgatgttctgaccttttattttatgtcacctttagaagcagttaagttagtacttttttacaaacatatgtataatgtattcgagtatttttattgaaaatattttggaaaacgacgaatccaataagaaaatttaaacatgatttgtaagttagtttaataggaaatatatgctaaaccaaaagaagcatactgttatttactggaataattaataatcatgtcatgttaaatgttcgcatataatcacgagataaaatctaaaatttaagattaatcttttatgaataaaaaacgtatcacaacaaataataaagtaaggtggtcaaggttatgaaagtattagtagccatggatgagtttcatggaattatttcgagttatcaagctaatagatatgttgaagaggcagttgcaagccaaattgaaactgcagatgtagttcaagtaccattgtttaatggaagacatgaattattagattctgtatttttatggcaatctgggcaaaagtatcgtataccagtacatgatgcagatatgaatgaagttgaaggtgtttacggacaaactgatacagggatgaccgttatcgaggggaatttatttttaaaaggtaaaaaaccaattgttgaacgaacaagttatggtttaggagaaatgattaaacatgcattagataatgacgcaaaacatgttgtaatttcactaggtgggattgatagttttgatgctggtgcaggtatgttacaagcattaggtgctcaattctatgatgacgaagggcgtgtcgtagatatgagacaaggtgctggtgtaattaaatatattcgtcgtatggatatgtcgaacttacaccctaaaatggaaacagcaagaattcaagtaatgtcggatttttcaagtcgattatatggtaagcaaagtgaaatcatgcaaacttatgatgcgcatcagttgaatcataatcaagcagcagaaatcgataatttaatttggtattttagtgagttatttaaaagtgaattgaaaattgcaattggtccagttgaacgtggtggtgctggtggtggaattgcagcagtcttgaatggactgtataaagctgaaatattaaccagtcatgcattagtagaccaactaacacatttagaaaatttagttgaacaagcggatttaattatttttggagaaggattaaatgaaaatgatcagttgctagaaacgacaacattgcgtattgcagaactttgtcataaacatcaaaaggttgccattgcaatttgtgcaactgctgaaaagtttgatttatttgaatcacaaggggttacagcaatgtttaatacatttatcgatatgccagaaacttatactgactttaaaatgggattacaaattaggcattatacggttcagtctttaaaactgttgaaaacacattttaatgttgaggtttagtaaagaaggactaaattggtgatgctgtcatgttggttaataacatttatgatggttagcaaaacgaattagaagatcgaaagtatacgtaaaaaatatgaaaaatcacgctatcattgcactgaatgttagcgtgatttttttattaattaagcctgagttggtatataatcgttggtttttagtgattttcagcgatatcttctacaattccaatgattacttgtactgctttttccataacatcaatggatgcatattcatatgggccgtggaagttaccgcaacctgtaaagatgtttggagttggtaaccccataaatgacaattgtgaaccatctgtaccaccgcgaataggttcagtgtttgctggaatatctaatttggcaaagacacgtttaggtatatcaataatatgaagcaatggtaatattttttctgccatattgaaatattgatccgatatatcaactttaactggataattttcaaaatgggcattgatatcgtcacgtatttctaaaatacgtttcttacgcaattcgaattgttttttatcatgatcacgaataatgtattgcaaagttgctttttcaacagttccttcaaagttcattaagtgataaaagccttcgtatccttctgttcgctccggaacttcactatcaggtagcaaactatcgaattgttcacctaaacgtattgcgtttaccattgcatttttagctgaaccaggatgaacatttacaccgtggcatgtaataaccgcttcagcagcgttaaagctttcatattgtaattctccatattgactaccatccatagtataagcaaaatcagcattgaagcggtcaacatcaaatttatgtggaccacgaccgatttcttcgtctggtgtaaatccaatgcgaatggtaccatgtttaatttctggatgttcttgtaaataacaaatagcttccataatttccacaatacccgctttatcgtctgcacctagtaacgatgtaccatcagttaccattaatgtatgaccaactaaactgttaagttctggaaatactttaggatctaagacacgtttagtattgcctagtttgtatggcttaccatcatagttttcaataatttgcggtttaacatttgaagcattgaaatcaggtgatgtatcaacatgcgccaaaaatccaactgttgggacgtcgacatcgatgttactttctaatgtagcaaataagtagccattttcatctaaatcagttggcaatcctaattgttgtaattctttttctaataaatgtaacaaatcccattgcttttcagttgaaggtgttgttgtagattttggatcagattgcgtatcaattgtcgtatatcttgttaatctatctatcaattggttcttcattatattcgaccccttaaactctattattcatgttgtaagattttttatatgtcttacctttgattttaccatacagttgtttgatacgtgtgtataggtaatatagaatttcagaaactaatataccgaaagcaatcgcacctgaaatcagtgtaacttctaaaaatgtatttacagcacttgtataatcatttgatactaaaaaacgagtcgcttgataagctgcaccaccaggtactaatggtataatgcctggcactatgaatataattaccggtcgtttatatctgcgactcatagtatgactcattaagcctaaaattaagcttcccaaaaatgaagcgccaacttttccaaactctaaatctaccgttaattggtaaatcgtccatgcaatggcacccacaaatccacatgctactaagaggcgtttgggtgcattgaaaatgatagagaaaagtactgttgatataaagctgattgtaaaatgaaataaataaaatagcatgctttaacagtccttccttaaatgattaataaaacgattgcgacaccagcaccgattgcgaatgctgttaatgcagcttcaacacctcgagacatacctgcaagtaattcacccgctaataaatctcgaatggcattggtaattaatataccagggacaagtggcatgacactggctatagtaatgatatcttgattggttgcaatgcctaatttagtaaatgtggctgcaatggatatgaccacagcggctgcaacaaactctgagaaaaatttaatttgtatatagcgttgcacaaagctgaatgttaaaaatgcggatccaccagcaatgactgcaatccaacaatctgatgcgacaccaccaaacataaataggaagaagccacatgcaatggcagctgcaaagaaattcgttaaaaaagaatattgtaatgatgcatgctgtaaatgaataaattcagatttagcttcatcaattgtgagttctttatttgatattttacgtgaaagactattcgttaaagcaattttctctaaatctgttgtacgctcttgtacacgaattaatcttgtacttgttcgatcatttaatgaaaaaataattgcagttgaactgacaaaactatatgtattatgaagaccataactatgtgcgatacggttcattgtatcttcaactcgatatgtttcagcacctgattcaagtaaaattctacctgcaattaatacaacatcaatcactttgttttcatctataattgtgattgaatctggcatatcaattcacctccaatgatatgtgttatttatttgaacaattgaagtttacaacttgttgttacaactttcaatagtgagactttgtgttagtatgatgaacttgtatggttcaaatttaaataagaaaaactgttaatctttgctattatactatgatttaataatagcaaaggattaacagttttgtcgttgttataaattgataatagggttaaacattactttgtttcgcccttgatttttggctacatgcaccatatcgtctgcatctttaaacactttacgctgtgattttggatcgtcatctgttaaataaccaacaccgatagacactgacaatttaataacttctttgtttggtaaatggaatgatgatttttcaacacccgaacgaatattttcagccaatttaacactttgatcaagtgaataattgtgaatgacaactgagaactcttcgccaccatttctaaaaattttaaattgattcggcacatagtttttaagtaattgagacatttgttttaatacagcatcacctgatttgtgtgagtaggtatcattgacatctttaaagccatcgatatcgattaataataatgcgatactttgatgttctttttcagcttttcgtgaaatttcatttaaatgtctatcaaattcttttacattacctaagcctgttaagtaatcatatttatcttcgttttcataacgatttacgagtgagaagaaatgccaaatatcgacaaatgttatcgctgaagctaaagtgataattaatgaaattggtattaaaatgataacttccgatagtgtgtaaataggactcactaacgcgacaccaaataaaatgattattgtaacaacattaagtattaataatgatagcacatcattttgttttaaaaatggtccaatagcacttgttactgcagcaataacaatcaacgtaacaccgtacataatcgagttgttaaatactacaatttcaacaattgctacaattactgtggcagataatgtatagaccatatttgtaaatctacctaaaaacaataaaggaacgaatgttaagtgaattaaataatcttcacgataagggatagggtagacagataataataatgatacgattgtcattaaaacagtgacataagccttagaaaaaaccatacgtttgttttctgaatactgtaagcgatggaataaatagattccagcgactataacagatatattgtatataaatgcttcgaacatgtctgaatcgactcctttaattgaccactagctattgtaagtgaaaacttacaatttgtcattagtttacatataaaattaatgtatgatatagactttgatgttaaaatgttgccttaaatgatatgatgaaaaaatgaataataggcgatatataagaaatgaatcgtatagttgtaaatatgatatcattgattgagcgaattaatttataataaagctataagatatacgtagaaaatagatatatcattctataaagacaatattaaataaatataacgttaaaaacaattaatatcgatgaaggtgaataaatggttacattattactagttgcagtaacaatgattgtcagtttgacgataacaccaattgttattgcaatatcgaaaagattaaatttagttgataaaccaaattttagaaaagtacacactaaacctatttcagttatgggtggtacagtgattctcttttcatttttaataggtatttggattggtcatcctattgaaacagaaatcaaaccacttattattggtgcgattattatgtacgtacttgggcttgtagatgatatctacgatttgaaaccgtatataaaattggctggtcaaattgccgctgccttagtagttgctttttatggtgtgactattgattttatttcgttgccaatgggtacaacgattcattttggatttcttagtattccaattactgtgatttggattgttgctattacaaatgcaattaacttaattgatggactcgatggtttggcgtcgggtgtttctgcaatcggactcattacaataggattcattgcaattttacaagctaatattttcataacgatgatttgttgtgttttattaggctctttaattgggtttttattttacaatttccatcctgccaaaatatttttaggtgatagtggggctttaatgattggatttatcatcggattcctttctttactcggattcaaaaatattacaattattgcattgttcttcccaattgttatcttagcagttccattcattgatactttgttcgcaatgattcgacgtgtgaaaaaagggcagcatataatgcaagctgataaatcgcatttgcatcataaactattagctttaggctacacacatagacaaacagtattattaatctattcaatctctattttatttagtctttcgagcattattttgtatgtatcgccaccattaggtgttgtattaatgtttgtattaatcatatttagtattgaattaattgttgaatttacaggattaatagataacaactaccgaccaatattaaatttaattagtcgtaagtcatctcataaagaagattagattttaaaacagtaagtaataaaataaaaaaatgatgtctgtacttttatgttgttataaaggaagacatactcacaaaaaacactagcatggaacgtgctttccaaattgcaaagtaacaatacgcaattagagttagccctcctaagctagtgtttttatttttattcagttggtatatcgaatggtaactgctttggagtttcttcagtcaaatcgaaatttcctgcagtcatttgatttaaaaagttaataaacgcttcatagtcacttttaacgacatcgatatagtagcttaccttatcagtgtaagtttggtttcttaacataaaatgagttgaagctaattcatattcaaatttaccagtttgatcataattcagtgttactatacatggtactgcttctcgtagttcgacacgtccgacatcataaatgacgtctctaacagcaccgctataggcgcgaattaaaccgccaccacctaatttaataccaccaaaatatcttgttactacgacacacgcattatgaacatcgagcttttttaatatgtctaacattgggacaccggcagttcctgtcggttcaccgtcatcattcgctttttgaatattcatttcaggtccaatagtatatgcagaacaattatgagtggcatctttatgttctttttttattgcagcaataaatgctttagcttcatcttcattttgaacaggtttgatatgagcaatgaatcttgatttactaatcacattttcaataatgtgttcttttttaacagtaatgatattttgtgtcataataactccttaattcataagcttaagattatttaatcttcattatacactgaaaatgacatgactataaatcgtttgattgccattttctttttaactgaaatattgtatcattgctatgagtatattttaggaggacgactatgaaaattgctgtgatgaccgattctacaagttatctgtcgcaggacttaatcgataaatataatattcaaatagcgccattaagtgtgacttttgatgatgggaagaactttacagaaagtaatgaaatagcaattgaagaattttataataaaatggcatcgtctcaaacgattccaacaacaagccaaccagcaattggcgaatggattactaaatatgaaatgttaagagatcaaggttacacagatatcattgtcatttgcttatcaagtggaattagtggaagttatcaatctagttatcaagcaggggaaatggttgaaggtgttaatgtacatgcatttgatagtaagcttgcagcaatgattgaaggatgttatgtattacgtgctattgaaatggttgaagaaggatacgaaccacagcaaattattgatgatttaactaatatgcgtgaacacacaggtgcatatttaattgttgatgacttaaagaatttacaaaaaagtggtcgaattactggtgctcaagcatgggttggaacattattgaaaatgaagccagttcttaagtttgaagatggcaagattataccagaagaaaaagttcgtactaaaaagcgtgccattcaaacattagaaaagaaagtattagatatcgtaaaagactttgaagaagtaactttatttgtcataaatggagatcattttgaagatggtcaagcgttatacaaaaagttacaagaagattgtccttcaggttataaagtagcatactctgagtttggtccagttgttgcagcacatttaggttctggtggattaggtttaggctatgttggcagaaaaataagattaacataattataaaattttaataaaagagtctatattgtaattggaaattatctctcgtatacattgctttaaatgttcatcatttgaaagtcaaaatgctaaagatataagaaaatcattataatattaggctcttttttacgttgaaatgaggttttaagcattaaacattacgggaaattaattcatcctcatacttcacttactaatgaaaaaattaaaaaagaagtaacaggtgtcatcaaacaaaattcaaactattattgtgttcaatgtgaaagtacaaatccaaagcatttttatcagtatgattcctcagtacattccaagaaaattgtatattgcagaaattgtatatcactgggtcgaatggataatgtaacaagatataaaataacagagagttcgcaaagttcatcacaagcatattatcatctctcatttgaattgtcggaacagcagtcttatgcctcagaacatattgttcgagccattagaaagagacaaacgattttgttatatgccgtaacaggtgcaggtaagacagaaatgatgtttcaaggcattcaatatgcaagaatacagggagataatatagctattgtgtcaccacgtgtagatgttgttgtagaaattagtaaacgtattaaagacgcatttcttaatgaagatatagacatactacaccagcaatcaagacaacaatttgaagggcattttgttgtatgcacagtgcatcaactttaccgattcaaacagcactttgatactatttttattgatgaagtcgatgcctttcctttatcaatggataaaaatctacaacaagcattgaagtcatcttctaaagttgaacatgcaacaatttatatgacagcaacaccaccgaaacaacttctgtcagagattccccacgaaaatataattaaattgccagctcgctttcataaaaaatcacttccagttcctaaatatcgttatttcaaacttaataataagaagattcagaaaatgttataccgaattttacaagatcaaattaataatcaacgttatacactggtgttttttaacaatatagaaacaatgattaaaacattttcggtttataagcagaaaattactaaattaacatacgtccatagcgaggatgtttttcgctttgaaaaagttgaacaattaaggaatggacatttcgatgtcatttttactacgacaatattagaacgtggatttacaatggcaaatttggatgttgttgttatcgatgcacatcaatatactcaagaggctttaatacaaattgctggacgtgttggacgaaaattagaatgtcctactggaaaagtattgtttttccatgaaggagtaagtatgaatatgattcaagctaaaaaagagattcaaaggatgaacaaattagcattaaaaagaggttggattgatgaataattgtttgagttgtggtgctaagttatatgaaaatataaccatttataatttgttcaagaaacctaatagattatgtgacagatgcaaagagaattgggacaatattaaacttgatattaaagcaaggcgatgttcaaggtgcttaaaacacttaaatcaagatgaagcgtattgtttagactgcaagtttctatcggcacactttaatttaatggaacaattatattgtcaatttcaatatgacggtttaatgaaagagatgatacatcagtataaatttttgaaagactattatttatgtgaattattggcacatttgattgaaataccacaaacatcttatgactatattgtgccaattccttcttcgccggcacatgatttatctagaacatttaacccggtagaagcagtactaaaagctaaagggattcgctttgataagattttaaagatgtcaaatagaccaaaacagtctcatttaactaagaaagagcgtctggcagatgaaaatccatttattattgatacggaattagatttaaatggcaaggaaatattactcgttgacgatatttatacaactggattaacaattcatcgtgcagggtgtaaattatatgctaaaaatatcagaaaattcaaagtgtttgcgtttgcacgatagcgtaaaaatgttaaaatataataaagagttaccaataaagaggtttaaggagagattactatgattagatttgaaattcatggagataacctcactatcacagatgctattcgcaactatattgaggaaaaaattggtaagttggaacgttattttaatgacgtaccaaatgcagtggcgcatgttaaagttaaaacttattcaaattcagctactaaaattgaagtaacaattccattgaaaaatgttacgttaagagctgaagagcgaaacgatgatttatacgcaggtattgatttaattaataataaacttgaaagacaagttcgaaaatataaaacacgtattaatcgtaagagccgtgatcgaggagatcaagaagtgtttgttgccgaattacaagaaatgcaagaaacacaagttgataatgacgcttacgatgataacgagatagaaattattcgttcaaaagaattcagcttaaaaccaatggattcagaagaagcggtattacaaatgaatctattaggtcatgacttctttgtattcacagacagagaaactgatggaacaagtatcgtttaccgccgtaaagacggtaaatatggcttgattcaaactagtgaacaataaattaagtttaaagcacttgtgtttttgcacaagtgcttttttatactccaaaagcaaattatgactatttcatagttcgataatgtaatttgttgaatgaaacatagtgactatgctaatgttaatggatgtatatatttgaatgttaagttaataatagtatgtcagtctattgtatagtccgagtcgaaaatcgtaaaatatttataatataatttattaggaagtataattgcgtattgagaatatatttattagtgataaacttgttgacaacagaatgtgaatgaagtatgtcataaatatatttatattgattctacaaatgagtaaataagtataattttctaactataaatgataagatatattgttgtaggccaaacagttttttagctaaaggagcgaacgaaatgggatttttatcaaaaattcttgatggcaataataaagaaattaaacagttaggtaaacttgctgataaagtaatcgctttagaagaaaaaacggcaattttaactgatgaagaaattcgtaataaaacgaaacaattccaaacagaattagctgacattgataatgtcaaaaagcaaaatgattatttagataaaattttaccagaagcatatgcacttgttagagaaggctctaaacgtgtattcaatatgacaccatataaagttcaaattatgggtggtattgcaattcataaaggtgatatcgctgagatgagaacaggtgaaggtaaaacattaacagcgacaatgccaacatacttaaatgcattagctggtagaggtgttcacgttattacagtcaatgaatacttatcaagtgttcaaagtgaagaaatggctgagttatataacttcttaggtttgactgtcggattaaacttaaacagtaagacgacagaagaaaaacgtgaagcatacgcacaagacattacttacagtactaataatgagctaggttttgattacttacgagataacatggtgaattattctgaagatagagtaatgcgtccattacattttgcaatcattgatgaggttgactcaattttaatcgacgaggcacgtacgccattaattatttctggtgaagctgaaaagtcaacgtcactttatacacaagcaaatgtttttgcgaaaatgttaaaacaggacgaagattataaatacgatgaaaaaacgaaagctgtacatttaacagaacaaggtgcggataaagctgaacgtatgttcaaagttgaaaacttatatgatgtacaaaatgttgatgttattagtcatatcaacacagctttacgtgcgcacgttacattacaacgtgacgtagactatatggttgttgatggcgaagtactaattgtcgatcaatttacaggacgtacaatgccaggccgtcgtttctcagaaggtttacaccaagctattgaagcgaaggaaggcgttcaaattcaaaatgaatctaaaactatggcgtctattacattccaaaactatttcagaatgtacaataaacttgcgggtatgacaggtacagctaaaactgaagaagaagaatttagaaatatttataacatgacagtaactcaaattccgacaaataaacctgtgcaacgtaacgataagtctgatttaatttacattagccaaaaaggtaaatttgatgcagtagtagaagatgttgttgaaaaacacaaggcagggcaaccagtgctattaggtactgttgcagttgagacttctgaatatatttcaaatttacttaaaaaacgtggtatccgtcatgatgtgttaaatgcgaaaaatcatgaacgtgaagctgaaattgttgcaggcgctggacaaaaaggtgccgttactattgccactaacatggctggtcgtggtacagatatcaaattaggtgaaggcgtagaggaattaggcggtttagcagtaataggtacagaacgacatgaatctcgtcgtattgatgaccagttacgtggtcgttctggacgtcaaggtgataaaggggatagtcgcttctatttatcattacaagatgaattaatgattcgttttggttctgaacgtttacagaaaatgatgagccgactaggtttagatgactctacaccaattgaatcaaaaatggtatcaagagctgtagaatcagcacaaaaacgtgtagaaggtaataacttcgacgcgcgtaaacgtatcttagaatacgatgaagtattacgtaaacaacgtgaaattatctataacgaaagaaatagtattattgatgaagaagacagctctcaagttgtagatgcaatgctacgttcaacgttacaacgtagtatcaattactatattaatacagcagatgacgagcctgaatatcaaccattcatcgactacattaatgacatcttcttacaagaaggtgacattacagaggatgatatcaaaggtaaagatgctgaagatattttcgaagtcgtttgggctaagattgaagcagcatatcaaagtcaaaaagatatcttagaagaacaaatgaatgagtttgagcgtatgattttacttcgttctattgatagccattggactgatcatatcgacacaatggatcaattacgtcaaggtattcacttacgttcttatgcacagcaaaatccattacgtgactatcaaaatgaaggtcatgaattatttgatatcatgatgcaaaatattgaagaagatacttgtaaattcattttaaaatctgtagtacaagttgaagataatattgaacgtgaaaaaacaacagagtttggtgaagcgaagcacgtttcagctgaagatggtaaagaaaaagtgaaaccgaaaccaatcgttaaaggcgatcaagttggtcgtaacgatgattgtccatgtggtagtggtaaaaaattcaaaaattgccatggaaaataaatgatataaaataactccttccaattaaacacctatagtttgtgttatgggaggagtctttttattttacaagcgttaaatactttaaaaaatgtgaagaagttgttaaacgttgttatgtacttagttttaaaaaatcggtttaggcatatgtcgatgataaatgtactgatttttaacaataaatgcataaactaattgtcagtgtgcttatatttcttaacattgttatttaacaaaattatgttaaaatttagcattataaaagatgcaaatcaatgacttgaattgaaatataaataggagcgaatgctatggaattatcagaaatcaaacgaaatatagataagtataatcaagatttaacacaaattagggggtctctttgacttagagaacaaagaaactaatattcaagaatatgaagaaatgatggcagaacctaatttttgggataaccaaacgaaagcgcaagatattatagataaaaataatgcgttaaaagcaatagttaatggttataaaacactacaagcagaagtagatgacatggatgctacttgggatttattacaagaagaatttgatgaagaaatgaaagaagacttagagcaagaggtcattaattttaaggctaaagtggatgaatacgaattgcaattattattagatgggcctcacgatgccaataacgcaattctagagttacatcctggtgcaggtggcacggagtctcaagattgggctaatatgctatttagaatgtatcaacgttattgtgagaagaaaggctttaaagttgaaactgttgattatctacctggggatgaagcagggattaaaagtgtaacattgctcatcaaagggcataatgcttatggttatttaaaagctgaaaaaggtgtacaccgactagtacgaatttctccatttgattcatcaggacgtcgtcatacatcatttgcatcatgtgacgtgattccagattttaataatgatgaaatagagattgaaatcaatccggatgatattacagttgatacatttagagcttctggtgcaggtggtcagcatattaacaaaactgaatcagcaatacgaattacccaccacccctcaggtatagttgttaataaccaaaatgaacgttctcaaattaaaaaccgtgaagcagctatgaaaatgttaaagtctaaattatatcaattaaaattggaagagcaggcacgtgaaatggctgaaattcgtggcgaacaaaaagaaattggctggggaagccaaattagatcatatgttttccatccatactcaatggtgaaagatcatcgtacgaacgaagaaacaggtaaggttgatgcagtgatggatggagacattggaccatttatcgaatcatatttaagacagacaatgtcgcacgattaatatatattttaaaaccgaggctctaaaagggcgtcggtttttggtttttttaaaggtagctaaataaattgtaaattagattttggaatatgatttgtttatgaatatttaagtacaattcggtagatagagttagaatatattttttgaaagttgtatttgttaaaacaacatatgcagtgtgcatttagtaatattacctatggcgattttcaaggtattgaattaatcgttgaaaacgttctcaattacatggtatgaatacattttacactatgataaaaggttgtattctttttatattgttaaccatttgattacatcgttataacaatagcttttgacaaaatgtattgtgctatagtatttgcatacttaaaatactaacagcaaaggaatgacagcaagatgaaaaaaactcttacagtgacggtttcgtcagtgttagcttttttagctttaaataatgcagcacatgcacaacaacatggcacacaagtaaaaacacctgttcaacataattatgtatcaaatgttcaagcacaaacgcaatcaccgacaacttatacagtagttgctggcgattcattatataagattgcattagagcatcacttaacgttgaatcaattatattcatacaatcctggtgtaacacctttaatttttcctggtgacgtgatttcacttgtgcctcaaaataaagtgaaacaaactaaagcggttaaaacaccagtaagaaaagcaagccaagctaaaaaggtagtaaaacaacctgtacaacaagcgtctaaaaaagtagtagttaagcaagcacctaagcaagcagtagctaagacagttaatgtagcatacaaacctgctcaagtacaaaaatcagtaccaactgtacctgttgcacataactacaataaatcagttgctaacagagggaacttatatgcttatggaaactgcacatattatgctttcgatcgtcgtgcacaattaggtagaagtataggaagtttatggggcaatgcaaataactggaattacgcagcaaaagttgcaggatttaaagtagataaaacaccagaagttggcgctattttccaaacagctgctggcccatatggacatgttggtgttgttgaatctgtaaaccctaatggaacaattactgtttctgaaatgaactatgctggatttaatgttaaatcttcaagaacaattttaaatccaggaaaatataattacatccactaagtaatatatcaagacaagactatcctcttagcctgtttaagtaacaggttgagaggattttttggtatcatttaatcagagttatataaagaagatatttaaatgatatttaattgattgatatgtaaaaagaaagtataatttatgattaattaatggaggaggtaattgaaatgggtgtacatcaatattttaaaagattatcagatatggaaagacttataagattacctggaaaatttaaatattttgaacacaatgttgcagcacactcctttaaagtaactaaaattgctcaatatctagcaacagttgaagaatatcatggacgaaagattaattggaaaagcttatatgaaaaagcattaaatcatgatttcgccgaagtgtttactggtgatataaaaacacctgttaaatatgcgagtagtgaattaaaaaaattattttcgcaagttgaagaagaaatggtagagacctttattgaagaagaaattccactacaatatagagatgtttataagcaacgactgcaagaaggtaaagatgattcattagaaggccaaatactttcagttgctgataaaattgatttgctttatgaaacatttggagaaatacaaaaacgtaatcccgaagaattatttttcgaaatttatgaaatgagtctagaaacaattattcaatttgaccatttagcatctgtacaagattttattaataatatcattccagaaatgttgactgaaaactttatacctagaacagaattaagagaaacaaccatgaacattttaaataaaagaaaagaggaaaatgaatgatatggtattttagcgcagcattctttccatgtgtcttggtagtattatttagtgtaataacaagaagtaaatgggtcggtactattctgacattaattttaattggtgcctcaatctataaagagtatttccataacgagtggattgtttttattgatgtagtgtcattattagctggttatttaattatagatcaactcgaatttcataaacatcaagatgaagatcgctaagattaactttaaaataatgtttcaaacaaatttgttgaaacaaaatgatgattaatataatgtgtatttacatactaaaaataacaagataaacgatttgatttaaggcaagcatagttagcacaactatgtttgtttttctttgttcgacatttttacgaacaaacgtttgctttttgtgtgactactttgctaaaatatgtaatgagaaagcaaagagttgagcggaaatataaataatacgttgaaagaggaggcatatgtgacaatggttgaacattatccttttaaaatacattctgattttgagcctcaaggtgaccaaccgcaagcaattgaagaaatcgtggaaggtattaaagcggggaaaagacatcaaactttattaggtgctactggcacagggaaaacatttacgatgagtaatgttattaaagaagttgggaaaccaacgttaattatcgcgcataacaaaacattagcaggacaattatatagtgagtttaaagaattttttcctgaaaacagggtggaatactttgtaagttactatgattattatcaaccagaggcatacgtaccgtctactgacacttttattgaaaaagatgcctcaatcaatgatgaaattgatcaactacgacattctgctacaagtgcattatttgaacgcgatgatgtaattattattgctagtgtaagttgtatatatggtttaggtaatcctgaagaatataaagatttagtagtaagtgttcgagttggtatggaaatggatagaagtgaattacttagaaaacttgtagatgtgcaatatacacgaaatgacatcgatttccaacgaggaacgtttcgagtgcgtggtgatgtagttgaaatattcccagcctctaaagaagaactttgtataagggttgagtttttcggcgatgagattgaccgtatccgagaagttaactaccgaacaggtgaagtgttgaaagaaagagaacattttgcgatattcccagcttctcacttcgtaacacgtgaagaaaagttgaaagttgcgattgaacgtattgaaaaagaattggaagaacgattgaaagaattacgagatgagaataaattactagaagcgcaaaggttagaacagcgtaccaactatgatttagaaatgatgcgagagatgggattctgttcaggaattgaaaactattccgtacatttaactttgcgaccactgggttcgacaccatatactttattggattactttggcgatgattggttagtaatgattgatgaatcacatgtgacattaccgcaagttcgaggcatgtataacggagacagagcgcgtaaacaagttttggtggatcatgggtttagattaccgagtgcattagataaccgtccacttaaatttgaagaatttgaagaaaagacaaaacaacttgtgtatgtatctgcaacgcctggaccatacgaaattgaacatacggataagatggttgaacaaattattcgtcctactggtttactggatcctaagattgaggttagacctactgaaaatcaaattgacgatttattaagtgaaattcaaataagggttgagcgtaatgaacgcgtacttgttacaacgctcactaaaaagatgagtgaagatttaaccacatacatgaaagaagcgggtattaaagttaattatctgcattcagaaatcaagacattagaacgaatcgaaataattagagacttacgaatgggtacatatgatgttatcgtaggtattaatttattaagagagggtattgatataccagaagtttctctagttgtcatattagatgcagataaagaaggatttttacgttctaaccgctcattaattcaaacaataggtagagctgcgcgtaacgataaaggtgaagtcattatgtatgccgataaaatgactgattcgatgaagtatgcaattgatgagacacaacgtcgtcgagaaatacagatgaaacataatgaaaaacatggtattacacctaaaacaattaataaaaaaatacatgatttaattagtgctactgttgaaaatgacgaaaataatgacaaagcacaaactgtgatacctaagaagatgacgaaaaaagaacgtcaaaagacaatcgacaatatagaaaaagaaatgaaacaagcagcgaaagatttagatttcgagaaagctacagaattaagagatatgttatttgaattaaaagcagaagggtgacaagtaaatgaaagaaccatccatagtagtaaaaggtgctcgtgcgcataacttgaaagatattgatattgaactacctaaaaataaattaattgttatgacaggtttatctgggtcaggtaaatcgtcattagcattcgatactatatatgctgaaggacaacgacgttatgttgaatcattaagtgcctatgcgcgtcaatttttaggccaaatggacaaaccagatgttgatacaattgaaggattatcgccagcaatttcaatagatcaaaaaacaacaagtaaaaatccaagatcaactgtagcaacagtaacagaaatatatgattatatacgtttgttatatgcacgtgttggtaaaccttactgtccaaatcacaatatagaaattgaatcgcaaacagtacaacaaatggttgaccgcattatggaattagaggcacgtacaaagattcaattattagcacctgtcatcgctcatcgtaaaggtagtcatgaaaagctaatcgaagatattggtaaaaaaggttatgtacgtttaagaatcgatggcgaaattgttgatgtaaatgatgtacctactttagataagaacaagaatcatacaatagaagttgttgtagaccgattagttgttaaagatggaattgaaacacgactagctgactctatagaaactgccttagagctttcagaaggacaattaacagtcgatgtcattgacggggaagaccttaagttttcagaaagccatgcttgtcctatatgtggattttcaatcggagagttagaaccaagaatgtttagctttaacagtccttttggtgcttgtccgacatgtgatggcttaggccaaaagttaacagtcgatgtagacttggttgttcccgacaaagataagacgctaaacgaaggtgcaatagaaccttggataccgacgagttctgatttttatccaacattgttaaaacgtgtttgtgaagtttataaaatcaatatggataaaccttttaaaaagttaacagaacgtcaacgtgatattttattgtatggttctggtgacaaagaaattgaatttacatttacacaacgtcaaggtggtactagaaaacgaacaatggttttcgagggtgtagttcctaatataagtagacgattccatgaatctccttcagaatatacacgtgaaatgatgagtaaatatatgactgaactaccttgcgaaacttgtcatggaaagcgattgagtcgtgaagcgttatctgtttatgtaggtggtttaaatattggtgaagtagtcgaatattcaatcagtcaagcgctgaactattataaaaacattgatttgtcagaacaagatcaagcgattgcaaatcaaatattgaaagaaattatttcccgactcacttttttaaataatgtgggacttgaatatttaacgttaaacagagcttcaggtacactttcaggtggtgaagcacaacgtattcgattagcaacgcaaattgggtcgcgtttgactggtgtcttatatgtattagatgagccatcaattggactgcatcaaagagataatgatcgattaattaatacacttaaagaaatgagagatttaggaaatactttaattgtagttgaacacgatgatgatacaatgcgtgcggctgattacttagtggatataggtcctggtgctggtgaacatggaggacagattgtgtctagtggtactcctcaaaaggtaatgaaagataaaaaatcattaacaggacaatacttgagtggtaagaaacgtattgaagtacctgaatatcgcagaccggcttcagatcgtaaaatttctatacgtggagctagaagcaacaatcttaaaggggttgatgtggacataccactatcaatcatgacggttgttacaggtgtatcaggttctggtaaaagctcattagtaaatgaagtattatacaaatcattagctcaaaaaattaataaatctaaagtaaagccaggattgtacgataagattgaaggtattgatcaacttgataaaattattgatattgatcaatcaccgataggtagaacgccacgctctaatccagcaacatatactggtgtgtttgatgatatacgtgatgtgtttgcgcaaacaaatgaagctaaaattcgaggatatcaaaaagggcgttttagttttaatgtaaaaggtggacgctgtgaagcttgtaaaggtgacggtattattaaaattgaaatgcattttttacctgatgtttatgttccttgtgaagtgtgtgatggtaaacgatataatcgtgagacactagaggttacttacaaaggtaaaaatattgctgacattttagaaatgactgttgaagaagcaacacaattttttgaaaatattcctaagattaagcgcaaattacaaacactagttgatgttggtcttggatacgtcacattaggtcaacaagctacaacgttatcaggtggtgaggctcaacgtgtgaaacttgcatctgaacttcataaacgttcaactggtaaatctatttatatcttagacgaaccgacaacagggttacatgttgacgatattagtagattattaaaagtattaaaccgattagttgaaaatggtgatactgttgtaattattgaacataacctagatgttatcaaaacagcagactatattatagacttaggtcctgaaggtggtagtggcggtggtactattgttgcgactggcacacccgaagatattgctcagacaaagtcatcctatacaggaaagtatttaaaagaagtacttgaacgagataaacaaaatactgaagataaataagattaaaagaagtgaaggatgttgtaaatttatccttcacttctttttattaattagtaatgaatagtagaaagaaaagatgtgtaaaaagaattatgttaagatagggtcaatctagagtagctaaacataaatcgaaactgagagtgggcagaaatgataaagaatcactaacgatttattatgtagtggttctttgtcattagccacagctattgtgtacttaaaaataggaatgcatgagtgcaattcatgcataagaaatactaatttctaaagaaaaagtatttctttatgttggggccccgccaacttgcattgtttgtagaatttcttttcgaaattctttatgttggggccccgccacctaattccaatatatcattgtagagcttaggtcattgatttatggctcggacttttatggcgatatgaaccatgtaaattaagcaagcaataaattaatgattgatattgacttgtaaaataataacaataatgaacaattaatatttattttagcttttcaatgtagattggtgttatatttttgatatgataagaagagatgtaagagtagggataaatacaattgaggtgaacccatgttaacgacagaaaaactagttgaaacattaaagttagatttaatcgctggtgaagaaggactatcgaagccaattaaaaatgctgatatatcaagaccaggcttagagatggcaggttatttttcacattatgcgtcagatagaatacaactattaggaacaacggaactatcgttttacaatttattaccagataaggatcgcgcaggtcgtatgcgtaaactatgcagaccagaaacgcctgcaattattgtgacgcgtggattgcagccaccagaagaattagttgaagctgcaaaagaattaaataccccacttatagttgctaaagatgcgactacaagtttaatgagtcgcttaacaacgtttttagagcatgcacttgcaaagacgacatctttacatggtgttttagtagatgtttacggtgttggtgtactaattaccggtgattcaggaataggtaaaagtgagactgcgttggaattagttaaacgtgggcatagattagtagcagatgataatgtagaaatacgtcaaattaataaagatgaactaatagggaaaccaccaaagttaatagaacatctattagaaatacgtggactaggtattatcaatgttatgactttatttggcgcgggttcaatattaactgaaaaacgaattagattaaatattaatttggaaaactggaacaagcaaaagttatatgaccgcgtaggtcttaatgaagagacgctaagtattttagatactgaaatcactaaaaaaacaatacctgtaagacctggtagaaatgttgcggtaattattgaggtcgctgcaatgaactatcgattaaatatcatgggcattaacactgccgaagaatttagtgaaagattaaatgaagaaattatcaagaacagtcataagagtgaggagtaggttgaatgggtattgtatttaactatatagatcctgtggcatttaacttaggaccactgagtgtacgatggtatggaattatcattgctgtcggaatattacttggttactttgttgcacaacgtgcactagttaaagcaggattacataaagatactttagtagatattattttttatagtgcactatttggatttatcgcggcacgaatctattttgtgattttccaatggccatattacgtggaaaatccaagtgaaattattaaaatatggcatggtggaatagcaatacatggtggtttaataggtggctttattgctggtgttattgtatgtaaagtgaaaaatttaaacccatttcaaattggtgatatcgttgcgccaagtataattttagcgcaaggaattggacgctggggtaactttatgaatcacgaggcacatggtggacctgtgtcacgcgcttttttagaacaattacatttgcctaattttataatagaaaatatgtatattaacggccaatattatcatccaacattcttatatgaatccatttgggatgtcgctggatttattattttagttaatattcgtaaacatttaaaattaggagaaacattctttttatatttaacttggtattcaattggtcgattctttatagaaggattacgtacagatagcttaatgctcacaagtaatattagagttgcacaattagtatcaattcttttaattttaataagtataagtttaattgtatatagaaggattaagtataatccaccgttgtatagcaaagttggggcgcttccatggccaacaaaaaaagtgaagtagtgatattttgagaaaatttttatcaaaaacacatcatcacacaaaccctttatggcgtgtataccgtcttgttaaattttcgaaagtttttaagaatgtaattatcattgaattttcgaaatttattccaagtatggtactgaaaagacatatatataaacaacttttaaatattaatatcggtaatcaatcgtcgatagcttataaagtaatgttagatattttttacccagaactgattacgattggtagtaacagtgttattggttacaatgtaacaattttgacgcatgaagcattagttgatgaatttcgttatggaccagtgacgataggatctaacactttggttggtgcaaattcaatcattttacccggtataacgattggtgacaatgtaaaagttgcagctggtacggttgtttcaaaagatataccggataatggatttgcatatggtaaccctatgtatataaaaatgattaggaggtgacaattttatggcgcaaaagaataataatgtaattccaatgacttttgatgatgcattttatcgtaaaatggctaaacagaagtttaaacaaagagaatataaacgagctgctgaatactttgaaaaagtgttagaattgtcacctgatgatctggaaattcaaattgattatgcacaatgtctagtgcaacttggtattgctaaaaaagcagaacatttattttatgacaatattatttataataggcatctagaagatagcttttatgaattgagtcagctcaacattgaagttaacgaaccaaacaaggcattcttgtttggtattaattatgttattgttagcgacgaccaagattatagagatgaattagatcaaatgtttgatgtgaaatatcaaagtgaagaacaaattgaacttgaagctcaattgtttgtagttcaaatactattccaatatcttttttctcaaggtcgattaaaagatgcaaagaattatgtcttacatcaaccacaagaagttcaagatcatcgtgtagtacgtaatttattggcaatgtgttatttatatctcggtgaatatgatacggctaaagcattgtacgaagcactattacaagaggatagtacagatatatatgcattatgccattatactttgctactttataacactaaggaaaatgaacagtatcaaaaatatttaaaaatattaaacaaagttgtacctatgaatgacgatgaaagttttaaattaggtattgtattaagttatttaaagcagtatcgtgcatcacaacaattgttgtaccctttatataaaaaagggaaatttttatcaattcaaatgtacaatgctttagcatataattattattatttaggtgaagaagacgaaagtcattactactgggataaattgaagcaaatttctaaagtggaaattggacatgcgccttgggtaattgaaaatagcaaagaagtttttgaccaacatattttgccattacttcaaagtgatgacagtcattatcgtttatatggtatttttttattggatcaattaaatggtaaagaaattgtgatgacggaaagtatttggcaggttctggaaaatctaaataattatgagaaattgtatttaacgtatttagttcaaggtttaacgctcaataaattagacttcattcatcgcggcttgttaacgctttaccaaaatgaattatttgtaagtgaaaatgatttaatggttgcatggattaatcaaggtgaactcataattgctgaaaaagtagatttaactgatgttgagccatatatcggtgcgtttatttatttgtattttaaaaatcaacctcgaaacgttacaaagaagcaaattacaacatggttaggcataacacaatataaactgaacaaaatgattgaatttctcttgagcatatagatttatgaaaagttagatttattatataatgcgcataatgattaataatgaggaggcgttaataaaatgactgaaatagattttgatatagcaattatcggtgcaggtccagctggtatgactgctgcagtatacgcatcacgtgctaatttaaaaacagttatgattgaaagaggtattccaggcggtcaaatggctaatacagaagaagtagagaacttccctggtttcgaaatgattacaggtccagatttatctacaaaaatgtttgaacacgctaaaaagtttggtgcagtttatcaatatggagatattaaatctgtagaagataaaggcgaatataaagtgattaactttggtaataaagaattaacagcgaaagcggtcattattgctacaggtgcagaatacaagaaaattggtgttccgggtgaacaagaacttggtggacgcggtgtaagttattgtgcagtatgtgatggtgcattctttaaaaataaacgcctattcgttatcggtggtggtgactcagcagtagaagagggaacattcttaactaaatttgctgacaaagtaacaatcgttcaccgtcgtgatgagttacgtgcacagcgtattttacaagatagagcattcaaaaatgataaaatcgactttatttggagtcatactttgaaatcaattaatgaaaaagacggcaaagtgggttctgtgacattaacgtctacaaaagatggttcagaagaaacacacgaggctgatggtgtattcatctatattggtatgaaaccattaacagcgccatttaaagacttaggtattacgaatgatgttggttatattgtgacaaaagatgatatgacaacatcagtaccaggtatttttgcagcaggagatgttcgcgacaaaggtttacgccaaattgtcactgctactggtgatggcagtattgcagcgcaaagtgcagcggaatatattgaacatttaaaagatcaagcttaattcgaggtcgaattaagatgttgagttgtaagttatttggatatttattttaatagtgtcatcacattgttaaaataatgtcttacttttaaattaaagcaaattatatagaaaactagaacttagtacgtatcatttgtgcgtttcaatgagttctagtttttttatatgttatattaaacttataactttatgggagtgggacagaaatgataaagagccactaatgatttattatgtagtggttcttacacattagccacagctaatgtgtacttaaaaataggaatacatgagtaaaactcatgcataagaaatactaatttctatagaaaaagtatttctttatcgttgtcccaccccaactcgcactgtctgtagaaattgggaatccaatttctctttgttggggccccgccaacttgcacattattgtaagctgacttttcgtaagcttctgtgttggggcccacaccccaactcgcattgcctgtagaatttcttttcgaaattctctgtgttggggcccacaccccaacttgcattgcctgtagaatttcttttcgaaattctctgtgttggggcccacaccccaacttgcattgcctgtagaatttcttttcgaaattctctgtgttggggcccacaccccaacttgcattgcctgtagaatttcttttcgaaattctctgtgttggggcccacaccccaacttgcattgtctgtagaaattggaaatccaatttctctgtgttggggcccctgactagagttgaaaaaagcttgttgcaagcgcattttcattcagtcaactactagcaatataatattatagaccctaggacattgatttatgtcccaagctccttttaaatgatgtatatttttagaaatttaatctagacatagttggaaataaatataaaacatcgttgcttaattttgtcatagaacatttaaattaacatcatgaaattcgttttggcggtgaaaaaataatggataataatgaaaaagaaaaaagtaaaagtgaactattagttgtaacaggtttatctggcgcaggtaaatctttggttattcaatgtttagaagacatgggatatttttgtgtagataatctaccaccagtgttattacctaaatttgtagagttgatggaacaaggaaatccatccttaagaaaagtggcaattgcaattgatttaagaggtaaggaactatttaattcattagttgcagtagtggataaagttaaaagtgaaagtgacgtcatcattgatgttatgtttttagaagcaagtactgaaaaattaatttcaagatataaggaaacgcgtcgtgcacatcctttgatggaacaaggtaaaagatccttaattaatgcaattaatgatgagcgagagcatttgtctcaaattagaagtatagctaattttgttatagatactacaaagttatcacctaaagaattaaaagaacgcattcgtcgatactatgaagatgaagagtttgaaacttttacaattaatgtcacaagtttcggttttaaacatgggattcagatggatgcagatttagtatttgatgtacgatttttaccaaatccatattatgtagtagatttaagacctttaacaggattagataaagacgtttataattatgttatgaaatggaaagagacggagattttctttgaaaaattaactgatttgttagattttatgatacccgggtataaaaaagaagggaaatctcaattagtaattgccatcggttgtacgggtggacaacatcgatctgtagcattagcagaacgactaggtaattatctaaatgaagtatttgaatataatgtttatgtgcatcatagggacgcacatattgaaagtggcgagaaaaaatgagacaaataaaagttgtacttatcggtggtggcactggcttatcagttatggctaggggattaagagaattcccaattgatattacagcgattgtaacagttgctgataatggtgggagtacagggaaaatcagagatgaaatggatataccagcaccaggagacatcagaaatgtgattgcagctttaagtgattctgagtcagttttaagccaactttttcagtatcgctttgaagaaaatcaaattagcggtcactcattaggtaatttattaatcgcaggtatgactaatattacgaatgatttcggacatgccattaaagcattaagtaaaattttaaatattaaaggtagagtcattccatctacaaatacaagtgtgcaattaaatgctgttatggaagatggagaaattgtttttggagaaacaaatattcctaaaaaacataaaaaaattgatcgtgtgtttttagaacctaacgatgtgcaaccaatggaagaagcaatcgatgctttaagggaagcagatttaatcgttcttggaccagggtcattatatacgagcgttatttctaacttatgtgtcaatggtatttcagatgcgttaattcattctgatgcgcctaagctatatgtttctaatgtgatgacgcaacctggggaaacagatggttatagcgtgaaagatcatatcgatgcgattcatagacaagctggacaaccgtttattgattatgtcatttgtagtacacaaactttcaatgctcaagttttgaaaaaatatgaagaaaaacattctaaaccagttgaagttaataaggctgaacttgaaaaagaaagcataaatgtaaaaacatcttcaaatttagttgaaatttctgaaaatcatttagtaagacataatactaaagtgttatcgacaatgatttatgacatagctttagaattaattagtactattcctttcgtaccaagtgataaacgtaaataatatagaacgtaatcatattatgatatgataatagagctgtgtaaaaaaatgaaaatagacagtggttctaaggtgaatcatgttttaaataagaaaggaatgactgtacgatgagctttgcatcagaaatgaaaaatgaattaactagaatagacgtcgatgaaatgaatgcaaaagcagagctcagtgcactgattcgaatgaatggtgcacttagtctttcaaatcaacaatttgttataaatgttcaaacggaaaatgcaacaacggcaagacgtatttattcgttgattaaacgtgtctttaatgtggaagttgaaatattagtccgtaaaaaaatgaaacttaaaaaaataatatttatatttgtcgtacaaagatgaaagcgaaagaaattcttgatgaattaggaattttaaaagacggcatttttacgcatgaaattgatcattcaatgattcaagatgacgaaatgagacgcagttacttgagaggagcttttctggcaggtggctcagtgaataaccctgaaacatcttcgtaccatttggaaattttttctcaaaatgagagtcatgcagaaggcttaacgaaactaatgaatagttatgagttgaatgccaaacatttagagcgaaaaaaaggaagtattacgtatttaaaagaagcggaaaagatttcggattttcttagtttgataggtggctatcaagcgttattaaaatttgaagacgtacgtattgtaagagatatgcgtaattctgttaaccgactcgttaattgtgaaacggccaatctaaataaaacagttagtgctgcgatgaaacaagttgagagcattaaattgattgataaagaaattggtattgaaaatttaccagacaggttgagagagattgctagaattcgagtagaacatcaagaaatttcgttgaaagagcttggagaaatggtatcaactggtccaatttcaaaatcaggtgtaaatcaccgattaagaaaacttaatgatttagccgataagattagaaatggtgaacaaatagaattataagtaagaaggtgtttttggtagtgaattatcaaaaataccttttttatgattaaaaagtgtttaatgaataatagtcgactaactattaaattgagctggaaagtttaatgaaggaaattcaataaccaagcgttacctaattttctcattaagtagcatcatatgtatcaatttggtcataagaaaatatgaatgtgataattaattgagtcactgatcatagacaaaaacaaaatcagcataaaaaagaatcccgactttgcgggattctctgtattgaaaagtattgtattttattaaaacagcctccttgaagggaattgaacccctatcttaagaaccggaatcttacgtgttatccattacaccacaaggagcaaatatgtaatcatatctctgtactatgagaagtaaaataagtacaatctaaaatagatattatcagtttacaaaggaaagagaaaagcgtcaaacaatgtaactatttaaagtcaaagtgtttgaccaaatttgacttaatatgtaaaataatgagtaacagttattacaaggaggaaatatagatgaatttaattcctacagttattgaaacaacaaaccgcggtgaacgtgcatatgatatatactcacgtttattaaaagaccgtattattatgttaggttcacaaattgatgacaacgtagcaaattcaatcgtatcacagttattattcttacaagcgcaagactcagagaaagatatttatttatacattaattcaccaggtggaagtgtaacagctggttttgcgatttatgatacaattcaacacattaaacctgatgttcaaacaatttgtattggtatggctgcatcaatgggatcattcttattagcagctggtgcaaaaggtaaacgtttcgcgttaccaaatgcagaagtaatgattcaccaaccattaggtggtgctcaaggacaagcaactgaaatcgaaattgctgcaaatcacattttaaaaacacgtgaaaaattaaaccgcattttatcagagcgtactggtcaaagtattgaaaaaatacagaaagacacagatcgtgataacttcttaactgcagaagaagctaaagaatatggcttaattgatgaagtgatggtacctgaaacaaaataattcaaagtaaagagtagactaagcagtctgctctttttgtatgagtaaaccgaggtgtcaataaattgtttactatactttgagcggaaatatgattgaatgaagctagttgaatcgtaactatatgaaatgttcccttcaaagtagacattgaaaggaacatttcaatcctttgtttgtaagtcgctctagacattacatttagtacatatgttgtttctaatgctcattaatggtattgattattctttgattaaatcttcaagtgccatttttaaattactatatttaaattggaatcccaatgcttgaattttattaggtaatactttttgagtatccaatactactgttgacatttgaccaagtatgagacgcattgcaagacttggtgcccaagtttcatgaggcttatgcatagctcttgctaaagtgtagccaaataaattttgacgctcaggtataggtgcagttaaattaaacggaccactagctgactcgttatttattaaaaataaaatagcttgaattaaatcattgatatgaatccatgaataccattgttgaccagaacctaatttaccaccaatgtaatattcgtatggtagtttcattgtttgtaacgcaccgccttcattcgataaaattataccgaaacgaccgatgacaactcgtgtacctaattgttcaaattgctgtgcgaaacgttcccattgatacacaatatctgataagaaatcaaatggtaaagttttataaacttctgtgtaactcataaataaatcaggaggatagtaaccagtggcactagcattaaataaaactttaggtgctttattacgtgatttaaacaattcatataaagcttgcgtagattgaattctacttagcattagcgtttgtttatattccggtgtccatcgtttattcagtgtagcacctgctaagttgatgaccacatcgatattttgaggaactttgtgttcccacccagatttagcccagttgacatatgaaattttcttatcatttgaaatttggtcgtgtcgcgttaatatcgtgatatgtgaatctgattttttaatttcattaactaattgagatccaaccataccagtcccaccagtaattaagtattgtttcattatcattcaccccatgtaattttgtatttagttactatttaataatcattattgttgttcaaaggttatacattatttagacaataatatgtcaataactttttttgaattgtattttaataaaaatgatataagttataataaaggtgtaccttcgataacgaataaacatctcttaaaagtatgtgtaaaacgctgcatgatacaaacgaaggtaaaaatttgactccctttagtagtggacccgtacgttaatcgtgcgggtcgtttttatttatttcttattcccattatacatcaatttaaagcattaattttttaaacaaatttaagaatacatagtaatataacaatctaaacataaaaacttttaacacaacacttaaaccaatgctttaattttcaatacgtagctataatttgttgtaaaatcaaaaaggttaaaatgttaattttcaaaaaaaggctcaaaatatgtttgatttagttattaaatgttaagatatataagactactatttctttgtaaaaatgaatccgatttacgagtgagtaatagtgaaggcagttttaagttgaagaaggcaaaaagagtaaatgtttattaatatttgtagaaactaggtaagcaaattagttgtgaaaatgttaatggttgcgtgataatttctatatttaaattagtttgaagtgagggagagtatgtcgaatcaaaattacgactacaataaaaatgaagatggaagtaagaagaaaatgagtacaacagcgaaagtagttagcattgcgacggtattgctattactcggaggattagtatttgcaatttttgcatatgtagatcattcgaataaagctaaagaacgtatgttgaacgaacaaaagcaggaacaaaaagaaaagcgtcaaaaagaaaatgcagaaaaagagagaaagaaaaagcaacaagaggaaaaagagcagaatgagctagattcacaagcaaaccaatatcagcaattgccacagcagaatcaatatcaatatgtgccacctcagcaacaagcacctacaaagcaacgtcctgctaaagaagagaatgatgataaagcatcaaaggatgagtcgaaagataaggatgacaaagcatctcaagataaatcagatgataatcagaagaaaactgatgataataaacaaccagctcagcctaaaccacagccgcaacaaccaacaccaaagccaaataataatcaacaaaacaatcaatcaaatcagcaagcaaaaccacaagcaccacaacaaaatagccaatcaacaacaaataaacaaaataatgctaatgataagtagtatttagtcaaacaaaaatgaaccagtatgacagacaacacaattaattaggttgtctcgaatattggttcttatttttataattgttaattaggggagagatgatacttaaatagttagttgtttattttacggatagtgaaatttattttgagtgaggtgggacagaaatgatattttcgcaaaatttatttcgtcgtaccaccccaacttccattgcctgtagaatttcatttcgaaattctctgtgttggggcccctgactttaattgaaaaatgcttgttacaagtgcatttttgttcggtcaactactactaatgtaactttttggattctagagcattgttttatgtcctagtctcaaataataagtaaatgattagcgagtcagtataagggtatagatttgactacagcgaataaaataaaacgttttgttgaataacaaatcgaaaatatattgcaagcgctttatcaaattatttagaaaatttaagttttatgcttgcaatttttgaaatagaatagtactattgcaagtgtaaagaggttaatttttgtcccacgcgggacttaaaaaggcaaccactggttgtgacatatccttatttacatttataaatataaggaggaggtagtagtgaaagacttattgcaagcacagcaaaagcttataccggatctcatagataaaatgtataaacgtttttctattcttactactatctcaaaaaatcagcctgtcggacgtcgaagtttaagcgaacatatggatatgactgaacgtgtactgcgttctgaaacagatatgcttaagaaacaagatttgataaaagttaagcctaccggaatggaaattacagctgaaggtgagcaactgatttcgcaattgaaaggttactttgatatctatgcagatgataatcgtctgtcagaaggtattaagaataaatttcaaattaaggaagttcatgttgttcctggtgatgctgataatagtcaatctgttaaaacagaattaggtagacaagcaggtcaattacttgaaggcatattacaagaagacgcgatagttgctgtaactggcggatccacgatggcatgtgttagtgaagcaattcatttattaccatataatgtattcttcgtaccagccagaggtggactaggcgaaaatgttgtctttcaggcaaacacaattgcagccagtatggcacaacaagctggcggttattatacgacgatgtatgtacctgataatgtcagtgaaacaacatataacacattgttgttagagccatcagtcataaacactttagacaaaattaaacaagcaaacgttatattacacggcattggtgatgcgctgaagatggcgcatcgacgtcaatcacctgaaaaggtcattgaacaacttcaacatcatcaagctgtcggagaggcatttggttattattttgatacacaaggtcaaattgtccataaggttaaaacaattggacttcaattagaagaccttgaatcaaaagactttatttttgcagttgcaggaggcaaatcgaaaggtgaagcaattaaagcatacttgacgattgcacccaagaatacagtgttaatcactgatgaagccgcagcaaagataatacttgaataagagataaaaagtttaatactttttaaatatcattttaaaggaggccattataatggcagtaaaagtagcaattaatggttttggtagaattggtcgtttagcattcagaagaattcaagaagtagaaggtcttgaagttgtagcagtaaacgacttaacagatgacgacatgttagcgcatttattaaaatatgacactatgcaaggtcgtttcacaggtgaagtagaggtagttgatggtggtttccgcgtaaatggtaaagaagttaaatcattcagtgaaccagatgcaagcaaattaccttggaaagacttaaatatcgatgtagtattagaatgtactggtttctacactgataaagataaagcacaagctcatattgaagcaggcgctaaaaaagtattaatctcagcaccagctactggtgacttaaaaacaatcgtattcaacactaaccaccaagagttagacggttctgaaacagttgtttcaggtgcttcatgtactacaaactcattagcaccagttgctaaagttttaaacgatgactttggtttagttgaaggtttaatgactacaattcacgcttacacaggtgatcaaaatacacaagacgcacctcacagaaaaggtgacaaacgtcgtgctcgtgcagcggcagaaaacatcatccctaactcaacaggtgctgctaaagctatcggtaaagttattcctgaaatcgatggtaaattagatggtggtgcacaacgtgttcctgtagctacaggttcattaactgaattaacagtagtattagaaaaacaagacgtaacagttgaacaagttaacgaagctatgaaaaatgcttcaaacgaatcattcggttacactgaagacgaaatcgtttcttcagacgttgtaggtatgacttacggttcattattcgacgctacacaaactcgtgtaatgtcagttggcgaccgtcaattagttaaagttgcagcttggtatgataacgaaatgtcatatactgcacaattagttcgtacattagcatacttagctgaactttctaaataattttagtatagtttttattcaaatacgctagtgctcagaactatttagcattaattaaagcttatgagtaagcggggagcacaaacacttctccgcttatttttatataaaatttcctaattacaaggaggaaacaccatggctaaaaaaattgtttctgatttagatcttaaaggtaaaacagtcctagtacgtgctgattttaacgtacctttaaaagacggtgaaattactaatgacaaccgtatcgttcaagctttacctacaattcaatacatcatcgaacaaggtggtaaaatcgtactattttcacatttaggtaaagtgaaagaagaaagtgataaagcaaaattaactttacgtccagttgctgaagacttatctaagaaattagataaagaagttgttttcgtaccagaaacacgcggcgaaaaacttgaagctgctattaaagaccttaaagaaggcgacgtattattagttgaaaatacacgttatgaagatttagacggtaaaaaagaatctaaaaatgatccagaattaggtaaatactgggcatctttaggtgatgtgtttgtaaatgatgcttttggtactgcgcatcgtgagcatgcatctaatgttggtatttctacacatttagaaactgcagctggattcttaatggataaagaaattaagtttattggcggcgtagttaacgatccacataaaccagttgttgctattttaggtggagcaaaagtatctgacaaaattaatgtcatcaaaaacttagttaacatagctgataaaattatcatcggcggaggtatggcttatactttcttaaaagcgcaaggtaaagaaattggtatttcattattagaagaagataaaatcgacttcgcaaaagatttattagaaaaacatggtgataaaattgtattaccagtagacactaaagttgctaaagaattttctaatgatgccaaaatcactgtagtaccatctgattcaattccagcagaccaagaaggtatggatattggaccaaacactgtaaaattatttgcagatgaattagaaggtgcgcacactgttgtatggaatggacctatgggtgtattcgagttcagtaactttgcacaaggtacaattggtgtatgtaaagcaattgcaaaccttaaagatgcaattacgattatcggtggcggtgattcagctgcagcagcaatctctttaggttttgaaaatgacttcactcatatttcaactggtggcggcgcgtcattagagtacctagaaggtaaagaattgcctggtatcaaagcaatcaataataaataataaagtgatagtttaaagtgatgtggcatgtttgtttaacattgttacgggaaaacagtcacaagatgacatcgtgtttcatcacttttcaaaaatatttacaaaacaaggagtgtctttaatgagaacaccaattatagctggtaactggaaaatgaacaaaacagtacaagaagcaaaagacttcgtcaatgcattaccaacattaccagattcaaaagaagtagaatcagtaatttgtgcaccagcaattcaattagatgcattaactactgcagttaaagaaggaaaagcacaaggtttagaaatcggtgctcaaaatacgtatttcgaagataatggtgcgttcacaggtgaaacgtctccagttgcattagcagatttaggcgttaaatacgttgttatcggtcattctgaacgtcgtgaattattccacgaaacagatgaagaaattaacaaaaaagcgcacgctattttcaaacatggaatgactccaattatatgtgttggtgaaacagacgaagagcgtgaaagtggtaaagctaacgatgttgtaggtgagcaagttaagaaagctgttgcaggtttatctgaagatcaacttaaatcagttgtaattgcttatgaaccaatctgggcaatcggaactggtaaatcatcaacatctgaagatgcaaatgaaatgtgtgcatttgtacgtcaaactattgctgacttatcaagcaaagaagtatcagaagcaactcgtattcaatatggtggtagtgttaaacctaacaacattaaagaatacatggcacaaactgatattgatggggcattagtaggtggcgcatcacttaaagttgaagatttcgtacaattgttagaaggtgcaaaataatcatggctaagaaaccaactgcgttaattattttagatggttttgcgaaccgcgaaagcgaacatggtaatgcggtaaaattagcaaacaagcctaattttgatcgttattacaacaaatatccaacgactcaaatcgaagcgagtggcttagatgttggactacctgaaggacaaatgggtaactcagaagttggtcatatgaatatcggtgcaggacgtatcgtttatcaaagtttaactcgaatcaataaatcaattgaagacggtgatttctttgaaaatgatgttttaaataatgcaattgcacacgtgaattcacatgattcagcgttacacatctttggtttattgtctgacggtggtgtacacagtcattacaaacatttatttgctttgttagaacttgctaaaaaacaaggtgttgaaaaagtttacgtacacgcatttttagatggccgtgacgtagatcaaaaatccgctttgaaatacatcgaagagactgaagctaaattcaatgaattaggcattggtcaatttgcatctgtgtctggtcgttattatgcaatggatcgtgacaaacgttgggaacgtgaagaaaaagcttacaatgctattcgtaattttgatgccccaacttatgcaactgccaaagaaggtgtagaagcaagctataatgagggcttaactgacgaattcgtagtaccattcatcgttgagaatcaaaatgacggtgttaatgatggagatgcagtgatcttctataatttccgacctgatagagcagcgcaattatcggaaatttttgcgaacagagcattcgaaggctttaaagttgaacaagttaaagacttattctatgcaacattcactaagtataatgacaatatcgatgcggctatcgtcttcgaaaaagttgatttaaataatacaattggtgaaattgcacaaaataacaatttaactcaattacgtattgcagaaactgaaaaataccctcacgttacttactttatgagtggtggacgtaacgaggaatttaaaggtgaacgccgtcgtttaattgattcacctaaagttgcaacgtatgacttgaaaccagaaatgagtgcttatgaagttaaagatgcattattagaagagttaaataaaggtgacttggacttaattattttaaactttgctaaccctgatatggttggacatagtggtatgcttgagccgacaatcaaagcaatcgaagcggttgatgaatgtttaggagaagtggttgataagattttagacatggacggttatgcaattattactgctgaccatggtaactctgatcaagtattgacggatgatgatcaaccaatgactacgcatacaacgaacccagtaccagtgattgtaacaaaagaaggcgttacacttagagaaactggtcgcttaggtgacttagcacctacattattagatttattaaatgtagaacaacctgaagatatgacaggtgaatctttaattaaacactaatattgtaaaagatgttaagtaaacgcttaatgacacttattttttgaaaataatagtaatatcattttgttaaatgaaagaataaagctataataattatagaataactatttaaaggagattataaacatgccaattattacagatgtttacgctcgcgaagtcttagactctcgtggtaacccaactgttgaagtagaagtattaactgaaagtggcgcatttggtcgtgcattagtaccatcaggtgcttcaactggtgaacacgaagctgttgaattacgtgatggagacaaatcacgttatttaggtaaaggtgttactaaagcagttgaaaacgttaatgaaatcatcgcaccagaaattattgaaggtgaattttcagtattagatcaagtatctattgataaaatgatgatcgcattagacggtactccaaacaaaggtaaattaggtgcaaatgctattttaggtgtatctatcgcagtagcacgtgcagcagctgacttattaggtcaaccactttacaaatatttaggtggatttaatggtaagcagttaccagtaccaatgatgaacatcgttaatggtggttctcactcagatgctccaattgcattccaagaattcatgattttacctgtaggtgctacaacgttcaaagaatcattacgttggggtactgaaattttccacaacttaaaatcaattttaagcaaacgtggtttagaaactgcagtaggtgacgaaggtggtttcgctcctaaatttgaaggtactgaagatgctgttgaaacaattatccaagcaatcgaagcagctggttacaaaccaggtgaagaagtattcttaggatttgactgtgcatcatcagaattctatgaaaatggtgtatatgactacagtaagttcgaaggcgaacacggtgcaaaacgtacagctgcagaacaagttgactacttagaacaattagtagacaaatatcctatcattacaattgaagacggtatggacgaaaatgactgggatggttggaaacaacttacagaacgtatcggtgaccgtgtacaattagtaggtgacgatttattcgtaacaaacactgaaattttagcaaaaggtattgaaaacggaattggtaactcaatcttaattaaagttaaccaaatcggtacattaactgaaacatttgatgcaatcgaaatggctcaaaaagctggttacacagcagtagtttctcaccgttcaggtgaaacagaagatacaacaattgctgatatcgctgttgctacaaacgctggtcaaattaaaactggttcattatcacgtactgaccgtattgctaaatacaatcaattattacgtatcgaagatgaattatttgaaactgctaaatatgacggtatcaaatcattcaacaacttagataaataattttctttataatcaaatgctgacataattttagttgaggattattatgacggtataaattaaataaagattttgagttcacgcttaaataagttcacgcttaaatttatagcctgccacagagttgagactgtggtaggttttttattttgaagtattaatcataacagactaataatcatgaggtaactaataacacatatttaacttgtattcttaaactggtataataaatttatgttgaaatgaatattgtatgacagggtattcacttttattaaaaggtaaaattaaataaaggttttatagaacgtatttaaatatatgaggagtaaacaaatggctgatagaacgaataaagaaattaaaacaggacgctttattgcaactgcatcaatcgtattctcaatattattgattattcattactttgtttcgttggataatgcgactgccaaagcattacttaatttaacgaatcaaaacacttcagataaagcgattgattacattttaaacagctttagattcactggtattatgtatattttggcttatctagcaggcttcatcactttttggaatcgacatacttatgtgtggtggtttatgtttgcagtttatgtatcaaatagtttgtttacgttgattaatttatcaatcacaattcaagcaataaaagctgcacacggtgcgtacttaacattgccaattttaatcgttattataggttcggttgcattagcgatttatatgcttgttgtttctatcaaacgtaaaagtacatttaatcgctagaaaattgattttaacaataaaaatatgatatactacttgtcgtatataaggaacggaggacaatttatgcatacatttttaatcgtattattaatcattgattgtattgcattaataactgttgtactactccaagaaggtaaaagcagtggactttcaggtgccatcagtggtggtgctgagcagttattcggtaaacaaaaacaacgtggcgtcgatttattcttaaatagattaacaattattttatcaatattattttttgtacttatgatttgcataagttatcttggtatgtaaggtccggcgatgtaaatgtcgggcttttttatttataattaagaatgtaatagtttaacaataagctatgtaaaatatatagcctagttaagtatgcaaagggagcgttagatttatgcagataaaattaccaaaacctttcttttttgaggaaggtaaacgtgccgtgttattactacatggttttacaggcaattcgtctgatgttcgtcaattaggtcgatttttacaaaagaaaggttatacatcatatgcaccgcaatatgaaggccacgcggcaccaccagaggaaatactgaaatctagtcctttcgtttggtttaaagatgcgttagatggttatgattatcttgttgaacaaggttatgatgaaattgttgttgctggtctatcattaggtggggattttgctttaaaattaagcttaaatagagatgtaaagggtattgtaacgatgtgtgctcctatgggtggcaaaactgaaggtgccatttatgaaggctttttagaatatgcacgcaattttaaaaagtatgaaggtaaagatcaagagactattgataatgaaatggatcattttaaaccaactgaaactttaaaagaactaagtgaagcattagatacgattaaagagcaagttgatgaagtgttggatcctattttagtgattcaagcagaaaacgacaatatgattgatccacaatccgcaaattatatatatgaccatgtagattctgatgacaaaaatatcaagtggtacagtgaatctggacatgttattacgattgataaagagaaagaacaagtatttgaagatatttatcaatttttagagtcattagactggtcagaataaaaagagattttaacattagaaaggaggggcataatgaatttaaagcaatctatagaagagattattaatcaacctgaatatgaacctatgtcagtgtcagattttcaagatgcattaggtttaagtagtgccgactcatttagagatttaattaaggtgctcgtagaattagaacaatcaggattaatcgaacgtacaaaaacagacagataccaaaaaaagcatagttctagaggtcaatcaaaattgataaaaggaacgttaagtcaaaataaaaaaggctttgcattcttaagacctgaagatgaggatatggaagatatatttattcccccgacgaaaattaatcgtgccttggatggagatactgttattgtagaaatccatcaatcaaaaggtgaacataaaggtaaaatcgaaggggaagttaagtcgattgagaagcattctgtaactcaagttgttggtacgtatagtgaagctagacattttggctttgttattccggacgataaacgtattatgcaagatattttcattcctaaaggtcaaagtttaggcgcagtcgatggtcataaggtacttgtacaaattactaagtatgctgatggttcagataatcctgaagggcatatttcagcaatattaggacataaaaatgatccaggtgtagatattttatctattatttatcaacatggtattgaaattgagtttcctgatgtagtattacaagaagctgaagcagtacctgatcatattgagaatactgaaattaaaggccgtcatgatttacgtgatgaattgacaatcacaattgatggtgctgatgctaaagacttagatgacgcaattagtgttaaaaagttagcgaacggtaatacgcaattaactgtaagtattgctgatgtcagctattatgtaacagaaggttctgcattggataaagaggcatatgatagagcgacaagtgtatatcttgttgaccgtgtaattccaatgattccacatcgattaagtaatggtatttgttcattgaatcctaatgttgatcgtttaactctaagctgtcgcatggaaatcgatgctagtggtcgcgttgttaaacatgaaatttttgatagtgttatacattctgattatcgaatgacgtatgatgcggtaaatcagattattactgaaaaggatcctaacattcgcgaacaatataaagaaattacgcctatgttagatttagcacaagatttatctaatcgtttgattcaaatgagaaaacgacgtggtgaaatcgattttgatattagtgaagcaaaagtattagttaacgaagacggtataccaacagatgttcaattaagacaacgtggcgagggtgaacgtctaattgaatcatttatgttaattgcaaatgaaacagttgctgaacattttagtaagttagatgtaccttttatttaccgagtgcatgagcaacctaaatcagatcgcttaagacaattctttgattttattacaaactttggcatcatgattaagggtactggcgaagatattcatccaacaacacttcaaaaggttcaagaagaagtagaaggtcgacctgaacaaatggtcatttcaacaatgatgttacgttcaatgcaacaagcgcattatgatgatgtgaacttgggacattttggcttatcagctgaatattatacgcattttacatcaccaattagacgttatcctgatttaacagttcatcgtttaatccgtaagtatttaattgagaaatcaatggataacaaagaagtggagcgttgggaagacaaattgcctgagttagctgaacatacttctaaacgtgaacgtcgtgctattgaggcagaacgtgatactgatgaattgaaaaaagcagaatatatgattcaacatattggtgatgaatttgaaggtattgtcagctcagtagctaacttcggtatgttcattgaattgccaaatacgatagaaggtatggttcatattgcgaatatgactgatgattattaccgttttgaagagcgtcaaatggcattaattggtgagcgtcaagctaaagtatttagaattggtgacacagttaaggttaaagtgacgcatgttgatgtagatgaacgattaattgattttcaaattgttggaatgcctttacctaaaaatgaccgctcacagcgaccagtaagaggtaaaacgattcaagctaaaacgcgtggcaaatctttagataaatcgaaatctgatgataagggtcgtaagaaaaaaggtaagcaacgtaaaggtaaaaaccaacgtaataatgataaatcaggtaatagtaagcataagccattttataaagataaaagtgtgaaaaagaaagcacgtcgtaagaaaaaataagcagcaatgaggtgagtatgaatggctaagaagaaatcaccaggtacattagcggaaaatcgtaaagcaagacatgattataatattgaagacacgattgaagcgggaatcgtattacaaggtacagaaataaaatcgattcgccgaggtagtgctaaccttaaagatagttatgcgcaagttaaaaacggtgaaatgtatttgaataatatgcatatagcaccatacgaagaagggaatcgttttaatcacgatcctcttcgttctcgaaaattattattgcataaacgtgaaatcattaaattgggtgatcaaacacgtgaaattggttattcgattgtgccgttaaagctttatttgaagcatggacattgtaaagtattacttggtgtcgcacgaggtaagaaaaaatatgataaacgtcaagctttgaaagaaaaagcagtcaaacgagatgttgcgcgcgatatgaaagcccgttattaagcgatttagttgcttaatcgggctatatttgatatagttatatgtgcttttgtaaattacaaaagtatgatttgtttgatttattatttcggggacgttcatggattcgacaggggtcccccgagctcattaagcgtgtcggagggttgtcttcgtcatcaacacacacagtttataataactggcaaatcaaacaataatttcgcagtagctgcctaatcgcactctgcatcgcctaacagcatttcctatgtgctgttaacgcgattcaaccttaataggatatgctaaacactgccgtttgaagtctgtttagaagaaacttaatcaagctagcatcatgttggttgtttatcacttttcatgatgcgaaacctttcgataaactacacacgtagaaagatgtgtatcaggacctctggacgcgggttcaaatcccgccgtctccatatttgtagcctacaacctttgtggatgtgggcttttttatatgttttttatctattcttgtgaggaaggttaaattagctgtgtacgttgatatgatagtatttgcttaggttcaaattttcatgaatgaaaaattaatacttgtgtacatataagattttgcgttaagggttgaaagaatatgtgtcaaataagtgtcaaaaaagttgagcttagagttttaatattgttcataaaaaaattctttatataagataattcttcattcaaaacaacaaaaaagagtaggcgagctactctttttgttgtatttaacaattaaattagtgtgtcattatgagtgtaggtaagctaatttataatgacaataataattacaaagattataacgctgtatgcgagcattcataaatttatacttcatctaaactactgtggtcgtcatctttttgtcttttctttttctttctctcgttcttgttcttttttgtactcttcttcaaattctttttctttcttttctacttcttctcttgtttccgctctatgagaaaaatcctcggttttaagtttactaaatttgaatgatttagaatcaactgttttatcttctgagtatttatggacatttaaattaatatttccatcacctcttaactcatagataaacatggcttgtgcagttttgccttttttaatttgatcttggttatgttctgtccaatctttatattttttatcacttaaaagataaccatctcttaatttatttactgtatttttatcatcttgagtgatattaatatagtcatgagaaatagaagatggatttaaatctttatcgtcttttttagcagtaatttccattttaaaagcgatatatttctttttctcatctttttcattgatgataaacggttcttttattttagcttcaaatttgtcactaacaatagtatcgcctttaatttttatatccatattttttttgcttttaaattctttaagttcttcatttaattcttcattgtcattttctttctttttgtgactagtgctctctttttttgcactatcttgatgatgtccacaagcacctaagataagtgtacttgctaataatatccccattacttttttcatttaacatgtctcctttatttcgcaaaaatttattttaaaaactctaaatgacttatcattttgagtaattaaacaaagttgatattttgtgagattctaagatgatattaaataattcttgtaataatgattctatgtattgttgcaataaattaatgaaactataattactaatattatattacttttattgatagaaatatattacttttttaaaaaacttgtaatatatcgaaagatttaaatgtaaaattttgatttgttaagaaattacgtttgtaaaaataaaaaaatcaacttatttgtatgagataaatatgtattgaagaagaagtgttattaatttggaaaatactggtcaaagatgggagctcttaaaagcgttattgtattttttagtcaatacaaatagattgccgtaataataatcgtacttgatggttaaaaagttacttaaggctataaagcaaaactttttatatgagcagtcgaatataacgtttaaaatgattgtttttggatataaacgattaagtaaaatgctttttcagtttgaaattaatcatataaatttcttatgggaaggttgatatcttaatgattaatattatttcagctataggatctattggaacatttattatggctttattttattttgtatcagtttcagttcaactttatcaaatgaaaattagctttctgccagctttaggttttaaccaaattttattagaaagggaggaggatcaacttaatataatgaattcggcaacagaagagcatcatcataaagattatattaaactatttaatttaggtggcggtgctgctaaaaaaattgcaatagaggttttattgggtaatgataaagtcattcagaaaaaatacgtgaatattttacctagtaaagaagggtacatgttaccaattaataaaaatgtgtacgaagaattagaaagaacgattgagaataatggttatgaagctgatttgaatgtacgtatgacttattatcataatgtaagtcgcaaacaacaggaagttatattaaaaggtcaaatcgaccgttttaatacttataataataaagaaatttatgatttgcagtttatctaaaaattgatttaagagggtagttgtttattgcgaaaaatatcattcaattttaatgaaataatggcgtcattactataaaatattactttatgttgtaatgcatttttctataagatagaactaaaaggaggggcaaagatgcaaattagacaaatacatcaacatgactttgctcaagttgaccagttaattagaacggcatttgaaaatagtgaacatggttatggtaatgaatcagagctagttgaccaaattcgtctaagtgatacgtatgacaataacttagaaatagtagctgttcttcaaaacgaagttgtagggcacggtttactaagtgaagtttatcttgataacggagcacaacgggaaattggattagtgttagcacctgtatctgttgatattcatcatcaaaataaaggtattgggaagcgattgattcaagcattagaacgagaagcaatattaaaaggatataattttatcagtgtattaggatggccgacgtattatgccaatctaggatatcaacgcgcaagtatgtacgacatttatccaccatatgatggtataccagacgaagcgtttttaattaaagaattaaaagtgaacagtttagcgggaaaaacaggtaccataaattacacatctgcttttgaaaaaatatgatttcaagctaggattacattaggtagagttcatattaataataaaaaatgtttgcaatcaaatcgtacgttgtcgtttgtaattcttaaaatagcaataaataaaatgtttgttagtaaagtattattgtggataataaaatatcgatacaaattaattgctataatgcaattttagtgtataattccattaacagagattaaatatatctttaaagggtatatagttaatataaaatgactttttaaaaagagggaataaaatgaatatgaagaaaaaagaaaaacacgcaattcggaaaaaatcgattggcgtggcttcagtgcttgtaggtacgttaatcggttttggactactcagcagtaaagaagcagatgcaagtgaaaatagtgttacgcaatctgatagcgcaagtaacgaaagcaaaagtaatgattcaagtagcgttagtgctgcacctaaaacagacgacacaaacgtgagtgatactaaaacatcgtcaaacactaataatggcgaaacgagtgtggcgcaaaatccagcacaacaggaaacgacacaatcatcattaacaaatgcaactacggaagaaactccggtaactggtgaagctactacggcaacgaatcaagctaatacaccggcaacaactcaatcaagcaatacaaatgcggaggaattagtgaatcaaacaagtaatgaaacgacttctaatgatactaatacagtatcatctgtaaattcacctcaaaattctacaaatgcggaaaatgtttcaacaacgcaagatacttcaactgaagcaacaccttcaaacaatgaatcagctccacagagtacagatgcaagtaataaagatttagttaatcaagcggttaatacaagtgcgcctagaatgagagcatttagtttagcggcagtagctgcagatgcacctgcagctggcacagatattacgaatcagttgacagatgttaaagttactattgactctggtacgactgtgtatccgcaccaagcaggttatgtcaaactgaattatggtttttcagtgcctaattctgctgttaaaggtgacacattcaaaataactgtacctaaagaattaaacttaaatggtgtaacttcaactgctaaagtgccaccaattatggctggagatcaagtattggcaaatggtgtaatcgatagtgatggtaatgttatttatacatttacagactatgttgataataaaaacgatgttaaagcaactttgaccatgcccgcttatattgatccagaaaatgtaacgaaaacaggtaatgtaacattgacaactggcataggtagtacaacagcaaacaaaacagtattagtagattatgaaaaatatggtaagttttataacttatctattaaaggtacaattgaccaaatcgataaaacaaataatacgtatcgtcagacaatttatgtcaatccaagtggagataacgttattgcgccggttttaacaggtaatttaaaaccaaatacggatagtaatgcattaatagatcagcaaaatacaagtattaaagtatataaagtagataatgcagctgatttatctgaaagttactttgtaaatccagaaaactttgaggatgtcactaatagtgtgaatattacattcccaaatccaaatcaatataaagtagagtttaatacgcctgatgatcaaattacaacaccgtatattgtagttgttaatggtcatattgatccgaatagcaaaggtgatttagctttacgttcaactttatatgggtataactcgaatataatttggcgctctatgtcatgggacaacgaagtagcatttaataacggatcaggttctggtgacggtatcgataaacctgttgtccctgaacaacctgatgagcctggtgaaattgaaccaattccagaggattcagattctgacccaggttcagatagcggttcagattcgggtagtgattctaattcagatagcggttcagattcagcgagtgattcagattcagcaagtgattcagattcagcaagcgattcagattcagcaagtgattcagactcagcgagcgattcagattcagcaagtgattcagattcagcaagcgattcagattcagcaagcgattcagattcagcaagtgattccgactcagcgagcgattcagactcagatagtgactcagattccgatagtgactcggattcagcgagtgattcagactcagatagtgactcagattccgatagcgattccgatagcgattccgactcagatagcgactcagattcagacagcgattcagactcagacagcgattctgactcagacagtgactcagattccgatagcgattccgatagcgattccgactcagatagcgattccgactcagatagcgactcagattcagacaacgattctgactcagacagcgattcagactcagacagtgactcagattccgatagcgattccgactcagatagcgactcagattcagacagcgattctgactcagacagcgattcagactcagacagtgactcagattccgatagcgattcagactcagacagtgactcagattccgatagcgattcagactcagacagtgactcagattccgatagcgattcagattcagacagtgattccgactcagatagcgattccgactcagatagcgattccgactcagatagcgattccgactcagacagtgactcggattcagacagcgattccgactcagacagtgactcggattccgacagtgattccgactcagacagtgactcagattccgatagtgactcggattcagcgagtgattcagactcagatagtgactccgattcatcaagtgattccgactcagaaagtgattcaaatagcgattccgagtcaggttcaaacaataatgtagttccgcctaattcacctaaaaatggtactaatgcttctaataaaaatgaggctaaagatagtaaagaaccattaccagatacaggttctgaagatgaagcgaattcgtcactaatttggggattattagcatcattaggttcattactacttttcagaagaaaaaaagaaaataaagataagaaataagtaataataatattaaattaatcatatgattcatgaagaagtcaccttaaaaggtggcttttttacttggattttccaaatatattgtttgaatataattaataattaattcatcaacagttaattattttaaaaaggtagatgttatataatttggcttggcgaaaaaatagggtgtaaggtaggttgttaattagggaaaattaaggagaaaatacagttgaaaaataaattgctagttttatcattgggagcattatgtgtatcacaaatttgggaaagcaatcgtgcgagtgcagtggtttctggggaggagaatccatatgtatctgagtcgttgaaactaatagattataaaaacaataaacaatataccgcagaagcttataagaaaagtttagaagatttaatcgatacattaccacaaattggtaatgttaagtatgatgaacctgaatttaaagaaacagtaaaaaaatatcagcaacggtttatggcggaagatgatgcactaaaaaaatattttggtgaagaaagattattgaaacaaactactgtaaataatggtttgaattctaacatactaggaatgacgcaaggtagatatgagctcatatatgaaggattaaagaatcaaagtactgagtttttgaaggaaattgaacaagtgaaaaataataatcctcagttaaaagatttttcatgggaagaacaaaataaggctgatattgaattaaatactttagaaaataaagctctaatggtaggagctacttattttaatgaacacagagatgaagtagaagatttatataataaattagatatgattcttggttatgaagaagatgagcgaaaatctaaaaagcctataaataatagaatgttggaacgaactaaagaagatttagaaactataattagtgaattcttcagagatataaaaaaggaaaggccaaaagatattcctatgctgacagcagataaaaatcataatcaaactatggcattacgattaaaagcagatacagaagaagctaaaacaaataccgctaagagaagtaaaagaagtttaaatactcaaaattacaaatctgcatctcaagaagtaactgcagaacaaaaagcagaatacgaaagaaaagctgaagaaagaaaagaaaagttttttaactaaacaaaaaaataaaaataacacaccagttgtatcgttagaatatgacgaagacgacaacgaaaacgacaagcaacttgtggtttctgcgccatcaaagaaaccaacaacaccgactacatatactgaaacaacgactcaggtaccaatgcctacagttgagcgtcaaactcagcaacaaatcgtttacaaaaaaccaaaaccattagctggattaaatggtgaaagtcatgatttcacaacaacgcatcaatcaccaacaacttcaaatcacacgcataataatgttgttgaatttgaagaaacgtctgctttacctggtagaaaatcaggatcactggttggtataagtcaaattgattcttctcatctaactgaacgtgagaagcgtgtaattaagcgtgaacacgttagagaagctcaaaagttagttgataattataaagatacacatagttataaagaccgattaaatgcacaacaaaaagtaaatactttaagtgaaggtcatcaaaaacgttttaataaacaaatcaataaagtatataatggcaaataattaatgcatggctgcaaagcaaataatgagtttgccgtataaataacaatattttaaactagcaataaataatatcaaagtcatcatttcaatgatgcaatctagtatagtccacattctaaacaggtgtggactattacttttttcactttatattacgaaaaaattattatgcttaactatcaatatcaataattaattttaagctgaaaaacaataaaaatgttaagacaacgtttacttcaagttaattattatactgaaaattctggtatataatgctgttagtgaatataacagggaaattatattggttataatattgagtctatataaaggagaaataacagatgaaaaagaaattattagttttaactatgagcacgctatttgctacacaacttatcaattcaaatcacgctaaagcatcagtgacagatagtgttgacaaaaaatttgtagttccagaatcaggaattaataaaattattccagcttacgatgaatttaagaattcgccaaaagtaaatgttagtaatttaactgacaataaaaactttgtagtttctgaagacaaattgaataagattgtagattcatcggcagctagtaaaattgtagataaaaactttgccgtaccagaatcaaagttaggaaacattgtaccagagtacaaagaaatcaataatcgcgtgaatgtagcaacaaacaatccagcttcacaacaagttgataagcattttgttgctaaaggcccagaagtaaatagatttattacgcaaaacaaagtaaaccaccacttcattactacgcaaacccactacaagaaagttattacttcatacaaatcaacacatgtacataaacatgtaaatcatgcaaaggattctattaataaacactttattgttaaaccatcagaatcgcctagatatacacatccatctcaatctttaattatcaagcatcattttgcagttcctggatatcacgcgcataaatttgtaacacctgggcatgctagcattaaaattaatcacttttgtgttgtgccacaaataaatagtttcaaggtaattccaccatatggtcacaattcacatcgtatgcatgtaccaagtttccaaaataacacaacagcaacacatcaaaatgctaaagtaaataaagcatatgactataaatacttctattcttataaagtagttaaaggtgtgaagaaatatttctcattttcacaatcaaatggttataaaattgggaaaccatcattaaatatcaaaaatgtaaattatcaatatgctgttccaagttatagccctacacactacgttcctgaatttaagggtagcttaccagcaccacgagtataaaaattggcactaagtttacgagatatgataaatacctattattttaaatatagtctacaatctatgtggttgtaggctgtattttttgcagtttatcaataaacacccatcaacaaattataccgtttttctactttgaaagttggaagtaacataatcttaaataaatatattattaattaagataaatataagactcaagattattgttaatagtttgttcatcgcaagttaattattgtttctaaaatattggtatataattttcaatggcgaagaaaacagggtgaaaaagtcggttttacaatcaaagcaaataagggagcataaataaatgaaaaggaaagtactagtactaacaatgggtgtaatttgtgcaactcaattatggcattctaatcacgcaaacgcattagtgacagagagtgttgaaactaattttgttgtaaaagattcggataataaaaatattttacaaacccatactgaaattactactgaggagaaattttcagtagtagaaaagagtcaattaaatacactaaaatcactatctaatgacaactacatagaatatgatttacatactaatcaaacaggcattaaaaaaggttggttatatggttatagtgaaattgactcatcacatttcacagaccgtgacaaacgcgttattagacgtgatcatgttaaagaagcacaaagcttaattaacgattataaagatacacaaagctatgaagatctcgctaaggcaactgcaaaagtaagtacacttagtcagtctcaccaaaattatttaaataaacaaattgataaagtgaataataaaatagagaaaactgaaaaacgctaatccaaagtaaattataagttatacatctcgtttttaaatgacaatttatccccgtaaatattataaataatcttttcaaattccacatagatatagagacactaataaacctctttgtctcgatatgatagtctgcaacgattcatgttgtaggctttttaattttacaaataaggctaaatatataagttctgacacctaaaatatagaaaatacataaaagtaagtatagttattttattataattattaaatttttattaattaattgtaaaaatgtagaattataattaattaacgtttaatattaaaattaactaaaaagaaagaggtgttagttatgacagaatacttattaagtgctggcatatgtatggcaattgtttcaatattacttatagggatggctatcagtaatgtttcgaaagggcaatacgcaaagaggtttttctttttcgctactagttgcttagtgttaactttagttgtagtttcaagtctaagtagctcagcaaatgcatcacaaacagataacggcgtaaatagaagtggttatgaagatccaacagtatatagtgcaacttcaactaaaaaattacataaagaacctgcgacattaattaaagcgattgatggtgatacggttaaattaatgtacaaaggtcaaccaatgacatttagactattattggttgatacacctgaaacaaagcatcctaaaaaaggtgtagagaaatatggccctgaagcaagtgcatttacgaaaaaaatggtagaaaatgcaaagaaaattgaagtcgagtttgacaaaggtcaaagaactgataaatatggacgtggcttagcgtatatttatgctgatggaaaaatggtaaacgaagctttagttcgtcaaggcttggctaaagttgcttatgtttataaacctaacaatacacatgaacaacttttaagaaaaagtgaagcacaagccaaaaaagagaaattaaatatttggagcgaagacaacgctgattcaggtcaataatgctcattgtaaaagtgtcactgctgctagtggcacttttataatttttagatcacgatatgatttattatcaattcagaattaaaaaagtaaatagtatcaaaagcaagtgtatttaatattagaaaataaaaattttaaatttagtattaaaatggaatattactatatagttcaatgtgtattatcacagaaaataaaataatgctttacttctatatttaaaagtgtataatgaaagttaagtaataaagagcgtgaagaaaaatgtgagttatttatatagaatattctccttttcatttatgaatttgttacaaaatatttagtgcaaaagcacgacggaggtattcaatatgaataacggtacagttaaatggtttaatgcagaaaaaggttttggtttcatcgaaagagaagatggtagcgacgtattcgtacacttctcagcaatcgctgaagatggatacaaatcattagaagaaggccaaaaagttgaattcgacatcgttgaaggcgaccgtggcgagcaagctgcaaacgtagttaaaatgtaattttaacttattcaaacagtccttattatagggctgtttttttatgctttaaatcgataacagttggtgtggtaaaagcactagccgttatttttttgtccaataaatttaggtggagatttaacaatatataatggttctaaaatagatcgaactgatggaaaagttttttacttttcatctgtccgacttttgattttgaatataaaaaagcgccaatacagaactttaataatgacgagaattaaagtctgtatatggcgataacaagaagtaatgttaaacactcaaaatgtttaacaataataggataccacatcgcataatatcttactacttaattaataatttaactaatcaactttttgttaattttttattaagactgattaattattgagaatatttattgtttttaaaatctcataataattcagtaatcttgttttcatttaaaaggcgaaacattaaaataattaaataaaaatattgcgtttaatttacagcgtcaaatatacttatttctaatgctttggggtctactgaaacaagtaaagaatgatcgatgttactaatattgccattctccaaatttatttctgtgagtatttggaagctaccattaggcaacggtttaacaatagacaattgcttttccgcttgttgtattaaaaaaggttttgtagattgattattaatatgccattcactcatgtatgtttttcactcctgctttaatatagggttaaaaagtttatagttgagacattcatgttcaaccaaaattttgttcaaattcaataaatgtcttgtttaaaatagaaatattgtaaatgttatcgtccaaaacttcaccagttaagtatttgttttgaattaaaatttggcagttagttaagaagtcttgataatcacgatcgcaaaaatagttttcacgtgcatctttagcatcgccaaaaaagttagcgactgtttctgtttctcccttattcgaacgttcaatatataatttgtaaaatttagctattgtatacttttgttctttagttagttcattcaaaatattgggcctcctgaattatcatttgtaatctatacccaatttattgcaaaacacaaactaatttaactatttgatgaaactgtgttaataagctttaacaagccttagtttgtatggatctataaaattatctttaattgcatagggtgaaataatatgtagtccgtaacttttaactgatttttcacttacaccaaatttataagcttggtagataattttagtacaatacgtaaattttttgctgttcaaatttaatgtaactagataacgatgatttgtattttcatagtttttcttaacccattcagccgcttttttacctgcaccaggatagctgcaacgataaactttcatccaatcatttttgccacttgcataattatatttaaaagattcgaaggattgtgtagttggtttgtcgccaggcccctcaatttgtaaaatcgttttatcatcaatcgcgatactacaatgaccaaaaaatccccacatgacagggccttttgtaacaataatatcaccaggttgtaattggaatttgtcatcttgaatttctgaatacttattatctgcaattgtttttggtgagtttattggggatacgacaacgaataatataagtaaaattatcgttcgtttaatatagttcacttaaaagctccttgttgaagaaatatatgtaaatagtcttaaattagaattgtaatctttaataagcttgtaagactaaaacatatcttaaatattaaagtatgagagtgtgaaatgtctattaagaataaaaaacagtctgaaacatcattgagacgtttcagactggatataaaatgaatttcatttatagcacaccaaatataaatgtgtatattaatatagcgaatccaaaaatatagagaatgacagtgaaacttaaataggactcttttttagattctttgccagtttttttcattaatacgagtataaacgtagcggcaactaagaaaattaatgctagccaaaacagaattgcaaaatgtaaagacatgtgaaaccctccttatataccgtaattattaacctataaaactataaaaaataggataaatgtaatagagaacgagtacgatatttataaaaaataatatttcacttaaccagtttttagttatcattgcaatggtaaaggatacgatgagtatcacaccacaaatgataataccaggcaggagccaacataaatcatctaaatctttattatatgtgattaaaatattaaagataacaaaagtggtagtaataactatattgatagcatttaacaaaatgttattcatgactgacacctactagtataaaaatagcttcttaataaatatgataacactatttttcaataggtaaataaaaagtatagttatttttaaaatattatttgcagaatgctaaagtttattaattcaaacaagtgagcatatataggggtgtattgtattaatatgaaaagaatatttacatactaaaaacttttaaagttgtataattcgttaatgtttttagaatcagatatcaaaaaaatgtgcaaaatcacttttgcacatttacaaatactagttttctgataagattaataataacactttaaatagcgcttaataaatgaagggggcaagtcttatgacgttttacaatttcatcatgggttttcaaaatgataacacaccatttggtatattggccgaacacgttagtgaagataaagcattccctcgattagaagaaagacaccaagtaattagagcatatgtgatgtctaattacacagatcatcaattaattgaaactacaaatagagctattagcttatatatggcaaattaatttgagtagtaccaattatgatgtattagtgcatcccaaatatcttttgttttaaagtttatttcatcatttcttatcgaaaatggtgtaataatgtctttatctaaccaagtgttgataagttcatttggtacaccatctaacaacatttcacttttactaattataaaacattcccagtcaagtgaaacattttgtggattcacataattacattgattatgattatccataaacactcactcctttaaaattctgtactcttcattgcgttttaccccgtcacattatcttttaaactaaaatcatcattacttatgaaaaaaatgtacatcaaaagcaaaggttttcgctaccgaaaaagtttaaataatggtttaatatatttggtactcattttaataaaaagagaatacattttgagctatcaatactttttattgaagaggtgttattgttggctaaaacgttatatttaatgcgccacggacaaactttgtttaattttaagggactaattcagggatttggagattcgccgctaacagaacttggaattgctcaagctcaaaaggcacgtagttattatgaaactaaggggataaacttcgatttatatgcatcatcaacgcaagaacgcgcaagtgacacacttgaaaatgttgcacctaaccaatcgtatcaacgttttaagggactgaaggaatggcattttggaatatttgaaggtgagtcagtctatctatttgataatctatacaagcctgaggacttattcggagatcgaattgttcctttcaaaggagaggcaaggcaacaagttgaagaacgcattgtgaaaactttacatgatattatgtctcaaacaaagaataatgcattagtcgtgagtcatggaacaataatgggagtatttttaagatattgccttaaactagatgaagcattaaagcataatatcggtaattgtaatatcctgaaatttgaatatgacaatggaacatttaaatttgttgagttaattgatccaaatttataataaataaagcgttatacatagacacaagtatgtcttttgtataacgcttttaaaatacaactacataacgctttagaataataattgaataagtttttgtaatatcatcagagcaacaataataattattatgcttgatattttattgattattgttaataattttccggttttatcaattgatccaaccatttttcctaaaattgcgagtaaaaagaaccataaccatgaaacgctaatacaagcgattgtaaacgcaattttattgctgccactatataatgcagcactactaccaattacaccaattgtatctaaaatagcatgtggattgagtaatgaaactgataaagcaaaacttacttgtttcattggagacataatttgagtttctccatctgttgagggtttatcatgccaaatggtccaagccatatacatcaagaaaattaaaccaactatataaataattgcttgaagtacaggtaaagacataataatgatagatactcctaccactgcaataataataagtaagctgtctgacaacccggctgtaattattgcaggcaatacatatctatattttggttgattagctccttggttaaaaataaatacattttgtgcacctaaaggtaaaattagaccaatcgctaagataaatccatgaataattgcggttaccattaagttttgacacccctaaaacatagaatattctgaaaaaacttattgttatcatatcaaataaaaaacaactactcaatagtagagtagttgtatgaaaaatagaacctatatgatttgaatttatgagaaatgtagaatatataaaactgtattacttattaatcaaatcataaaaaagccaatgttcatcgaaataggtatttccgattttaattgcatttttctcaaaaccaagaatgtcgaatcctagtgcactatagaaaactttagcacctatgttgtttgacacaattgatgtaagtaaagattcgtaattgttctgccgtgcataattaataatgaaattaatgagctcgctattaatcgatttatcgttattagtaacaaagttgtatttaattaatgatttatgttcttttccaacgtatcgaatttgttctaaggcagctgttgcgataagtgtttcgttttcataacagccaaatacaatacatttcggtgaaccttgatttaaaatgtcatgtattaaggtgtcagtcattgtttgactataatgtgaatcttgagtgaattcttcattgactgtcgaaacaagtctcttatactcattaaaatcattattcgttaatgttttaatttcaatcattactgacctccttaatcattattaagaaagattttgtactaaaaaaatttcttaattacatattaaaatgtttattaaaattttgcaatcactgatttatatgcacattcttgtaaatggattatcaatttaattatatttatttttaagttcaggaaattatggaattggttattgatcgacactggacttttatttggagacgttatgcgaagaagtcaagccagtattggaaccggtcacatttatgatgactaagggacaatcattttcagttaaatattgccagaaatttcagtcacgaatagaaaaaataaccaaccaaaaatttttggttggcaaatttgaattttatgtgaattttattaataacgttgaataatctctttaagttaatgctaatctacaacatttacatttaaatcgacattaatatttccttgagtcgcttttgaatatggacaaaattcatgagccatttgtaaatatttttcagcttcttcttgagatataacatttttaattgtcgcatcaattgaaacacttaatttaggactttctgagtctgaatcatcttctagtctcactgttagtgttacttctggatgagcatcacgcactttgttttgctttaaaattaggtcgaaagcaccgttgaagcaagatgcataacctgctgcaaataattgttcggggttagtagctttaccatctgcttgagcaggcggaactatatcaatatctaacgctcgatcatcagtataaacatgtcctttacgtccgccaacattcgtcgctttagtttcataatgtattgccattcgtataacctcctaatttaaaatacatttatgctttacccattcgaaaataccttaatcattttcatttatagcattgtttgattgaaggataaaaagttgttgtttacaataaaaataatgagtatctgaaatgagggatttactatgacacatgtggaagtagtagcgactatcgcgccacaattatctatcgaagaaactttaattcaaaaaattaatcatcgtattgatgcaatagacgtattagaattacgaattgatcaaattgaaaatgtcacagttgatcaagtggcagaaatgattacaaagctgaaggttatgcaagattcattcaaattattagttacgtatcgtacaaagttacaaggtggctatggacaatttataaatgacttgtatcttaatttaatatcagacttagcaaatatcaatggcatagatatgattgatatagaatggcaagcagatattgacattgaaaaacatcaacgaatcattacacacttgcaacagtataataaagaggtggttatatcacatcataatttcgaaagtacgcctccgttagatgaattgcaatttatattttttaaaatgcaaaaattcaacccagaatacgttaaattagcagtaatgccacataataaaaatgatgtgttaaatttattgcaggcaatgtctacattttcagatactatggactgcaaagttgttggtatttcaatgtctaaacttggactaataagtagaacggctcaaggcgtttttggtggtgcattgacttatggttgtatcggagaaccacaagctccaggacagattgatgttactgatttaaaagcacaagtgactttatactaataaaatgaattaggttgcttttgtgtaagtgctgtcttataattgagaagtattatcattgttcgtggaggagcgattttagatggaattacaacaagcaatagctaatagaagaagtgtgaaaaaatttaaaagagatatgcacatagatgacgcattgctatatcaagcaattgagaaagctgctgatgctccaaatcacggaatgagggaaccatggagagttgtgcatgttccgaaagacagattaggagatatgagtaaggatatttctaaatttgcatttcctaatgaattagataagcaacaatgtcattatgatgcagttacgaaactaggtggcatgttattgcttattttaaaaacagattcaagacaacgtcaaaatgatgaaaactactttgcatttggtgcatatgcacaaaatcttatgttgttactttatgaagcgggaataggtacatgttggaaatcgccattatatatctatgatcctaaagtaagaaaaacacttggtataaagaaagatgaagttcttgctggattcttatatttaacggatttagaagaagatatgcctaaagcaccgcgtaaaaatagaaacttaattacattatattaatatgtataattatagaaacattaataaaagctgagtcatgaattgatggacatctatcgagttagagatttaatctaacttactagagtcggtacaatcacagtctcagctttttattgtgcagtatatacacatttttattttagtatttatttaaaagtttctgctaaaaatgattcaacttgctcaggtgacttagcatttgctgaatgaaggtgtgcaattttgtcgccgtttttaaatactagcaagctagggatacccataacttcattttcaacaactacatcttctaattcatcacgattaacagtataccattggtaatcattatattgttctacgattgggtcaatccataaatccatagcacgacagtctgggcaccatcctgcctcaaatttaacaattacaggtgtatcgctattaattacagatttaaatgattcattacttttgattgattgcattgtaacaactcctctagatagtttaataatttttattatagctaaatttatatcataataaaaaattttagcttcaaaatgaaagccttttgctatggaaaatgatatatttattttaaatacataaaggaggttgcagtcgtatgattaaattttaccaatataagaattgtacaacttgtaaaaaggcagcaaagtttttagatgaatatggcgtaagttatgaaccaattgatatcgttcaacatacacctacaataaatgaatttaaaacaataattgcaaatacaggcgtagaaattaataaattgtttaatacacacggcgcgaaatatcgtgagcttgatttgaaaaataaattacaaactttatcagatgatgaaaagttagagttgttatcatctgatggtatgttagtaaagcgtcctctagcagtaatgggcgataagataacattaggatttaaagaagatcaatataaagagacttggttagcgtaagtgaaatgtaagcgtttactaaatatctcgatatttagattcattacatgtaaaatgaaataagctatacaattgttaatttttataaatatagttgaatagcatctagccttatggcatcattaatgatgtaaagattaattaggaggggattctcttggcagtaccaaatgaattgaaatattcaaaagagcatgaatgggttaaagttgaaggtaatgtagcaacaattggaatcacagaatacgcacaaagcgagttaggtgatattgttttcgttgaattaccagaaacagatgatgaaattaatgaaggggatacgtttggtagcgtagaatcagttaaaactgtatcagaattatatgcaccaatctctggtaaagtagttgaagtcaacgaagaactagaagatagtcccgaatttgtaaatgaatctccatacgaaaaagcatggatggtaaaagtagaaattagtgatgaaagtcagattgaagctttattaacagctgaaaaatattcagaaatgattggtgaataatcaccgtgtaactccttaatctaagattgaggagtttatttttagtctgagtaagtaaataatatgaaagaaaatttattaggtactattatttggagtattgctacattttattattcaagaatgatgaaaataatgaatttagctattttaaaaataaaaattgggggaagttaatatgctaaacattcaagacgttagtcatctttctaaaaaggagcaaaaagcatataaccgtttcgtagaatctgtagaaaacggtaatttaccagtactaccatgtattgaaatggatctaaaagagatgaaagaagaaacattaaaccagagtaagattggtggaatgccatttttaaaatcttttaaagatataccattagatgaaaataatgtaccaatggtattgttagcacagattaatttggataatcttccagaacaacaagaattatttcctgtaaaagaagggatattgcagttttggattagttcagaagatcaaatgtatggtatgtctgaaaatttaaagggaaacaatataaactcaaggcttgtttatataaaagagccaattacagatttatcactcgaaaatattcaagcgcatttgaagtcattagatgctgataatgaggatatcccgttcagtggagcattttctatagaatttagattgtcgaaacaaactattacatgtactgattataagtacgatgaggacgtgcttgcattgtggaataaagtcaatccatccttcgcgctaaaatcaatgtttggtggttatgatgaattgatggaacctgtgtgtaacacatttactgctaaggaaccatttaatcaacttggtggttatccatattttgaccaaatagatccaagaacgaacgatcaagaactgaaaatgtatgatagagtcttactgcaaattgattctacaagagatggtaattcttcgattatatggggtgatttaggtattgccaatatcttagtaaaatctactgaccttgaggctatgaagtttgatgattacatgtattcatgggattgcagctaagagaatcataaaaatatattactttaataagtgtagtatctatagatcaatctagggagtgggacagaaatgaaaaagaaccactagtgatttataatgtagtggttatttttcataagccacagctaatgtgtatttaaaaataggaatacatgagtaaaacttatgcataagaaatactaatttctaaagaaaaagtatttctttatgttggggcccgccaacttgcacattattgtaagctgactttccgccagcttctgtgttggggccccgccaacttgcacattattgtaagctgactttccgccagcttctgtgttggggcccaccccaacttgcacatttattgtaagctgactttccgtcagcttctgtgttggggcaccgctataattgaaaagtttgttataggtgtattttcttttggttaactattggtaatataacattgtagattttaggatgttgatttttgacttagcctttgtctgcttatgttaaatgttacagctagtcaaacattgagtttgtaattattatattaagctagtttaaattttttgtgatttatgttttattcataccaattttgtgaaatgatacagtgacagatgtttattgattttaaagggtgatgatgatggctattgtaaataaagtgataattgttgaaggaaaatctgataaaaaaagggtgcaacaggttattgcagaaccagtcaatattatttgtactcatggaacaatgagtatagataagcttgatgatatgatagaatcactgtatgataaacaagtttttgtattagccgattctgatgacgaaggagatcgaattagaaattggtttaaacgttatttgagtgaaagtgaacatatatttattgataaaacttactgtcaagttgcgaattgccccaaacaatatttggcgcatgtactttcaaaacatggctttacttgtaagaaagaaacacctcttttaccgaatataaataatgaaaggttagttttagtaaatgaataattcattagacatcaaagatgtaactacattttatgaggaagacaaacatttaatctttggttatacaccaacgtgtggtacttgtaaggtttcagaaagaatgttagacattgctaatgaaatattgcagttaccattattgaaaatagatttaaacttttatcctcagttttgtaaagatatgcaaatcatgtctacgccgattttattgttgatgaataaagataaagaagtaaaacgaatttatgcatttcaatcggtgactgatttgttagaaaatttaaaatagttattgacgaaattttactaaggtgttaggattaatacaaattaaatgatgcgtaaactcttatcgagagtggtggagggatgtgccctacgaagcccggcaaccgtcttatatagaaatggtgccaattcacataaagttttaacttttgaagatgagagaaacaatactactattgctttctcaatttttctatcgatattgagaaagcattttttattttattaagcaacacagggaggaatcaacgtgattgaattaaaagaagttgttaaagaatatcggactaaaaataaagaagtccttgctgtagatcacgttaatttatcgattcgagcaggatcgatttatggcgtcattggtttttctggagcaggaaaaagtactttgattcgaatgtttaatcatttagaagcgcctacatcaggtgaagttattatagatggagaccatataggccaattgtccaaaaatggattaagagcaaaaagacaaaaagtaagtatgatcttccaacattttaatttgttatggtcaaggactgtgttaaaaaatattatgtttccgcttgaaattgcaggtgtccctagaaggagagcaaagcaaaaagcattggaacttgtcgaactcgtcggtttaaaaggtagagaaaaggcttatccatcagagttatcaggcggacaaaagcaacgtgttgggattgcacgagcgttagctaatgatccaacggtcttgctttgtgatgaggcaacaagtgcacttgatccgcaaacaacagatgaaattttagatctactactaaaaattagagaacaacaaaatttaacaattgtactaattacgcatgaaatgcatgtcattcgtcgtatttgtgatgaagttgcagttatggaaagtggtaaagtgatagaacatggaccggtaacacaggtttttgaaaatccgcaacacactgtgacaaaacgatttgtgaaagaagatttaaatgatgatttcgaaacatctttaacagaattagagccattagaaaaagatgcttatatcgttagattagttttcgctggttcaacaacaaccgagcctattgtatcgagtctatcaactgcctatgatattaaaattaatattttagaagcaaatattaaaaatacaaaaaatggaacagtcggctttttagttctgcatattccatatatttcaagtgtagatttcggaaaattcgaaaaagagttaattgagcgacaagttaaaatggaggtgttaagacatgggtaaatcatttagtgaaattataaatgaaatgattacaatgcctaatattcagtggccagaagtttggactgcaatagtcgaaacactttacatgacagtcgtctcaactatatttgcatttatactcggtcttattttaggtgtgttattattcttgtctgctaaaggtaagtctattggtgcaaggttattttattctatcgtttctttcattgttaacttatttagagcgataccatttattattttaattttattattaattccatttacaagtttgatacttggaacgataagtggtccgacaggtgcgttaccagcattgatcattggcgcagcgccgttttatgcaaggctcgtagaaattgcttttaaagaaattgataaaggtgtcatcgaagcggcttggtcaatgggtgctaatacttggacagtaattcgtaaagtccttttacctgaagccatgccagcgctagtttctggcattacagttacagcaatcgctttagttggttcaacagcagttgcaggtgtaattggtgccggtggtttaggaaatttagcatacttaacaggtttcactcgaaatcaaaatgatgtcattttagtatcaacagtttttattttaattattgtatttataatccaattcattggggattggcttacaaataaacttgataaacgataaattgggggtttcattttatgaaaaaattatttggtcttattttagtattaacatttgcagttgtattagcagcttgcggtaatggaaacaaaagtggcagtgacgacaagaaaataacagtaggtgcttcaccagcaccacatgctgaaattttagaaaaagcaaaaccattattagagaaaaaaggttatgaactagatattaaaacaattaacgattacactacgcctaataaattactagacaaaggtgaaattgacgcaaactatttccaacatacaccatatttaaacacagagaaaaaggataaaggttacaaaatcgtaagtgccggtgatgttcacttagaacctatggctgtatactctaaaaagtataaaagtttaaaagaattaccaaaaggtgcaacagtctatgtgtctaataatccagctgaacaaggacgtttcttaaaattcttcgttgatgcaggtttaattaaaatcaaaaaaggcgtaaaaattgaagatgctaagtttagtgatattacagagaataaaaaagatattaagtttaataacaaacaatcagcagaattcttacctaaaatttatcaaaatgaagacgcggatgctgttatcattaattcaaactttgcaatcgaacaaaaactaaatcctaaaaaagattctattgctgtagaaagtgcgaaagataatccttatgcaaacttaattgctgttaaagaaggacatcaagatgacaagaaaatcaaagcattaattgaagtattacaatctaaagatattcaagacttcattaatgaaaaatacaacggtgcagttattcctgctaaataaatcatattaatggctcagtaacgtgatgttactgggctttttaatttaaacaggtatttatatgatatttaggaatgagatgctattacggataaagtaaaatcctatatgcatgcgtgctactcatttattcttatttttaatttcacatggatagtgactactacatcataaatcattagtgattctttattatttcagtcccactccctcaagttaatgatgaatctatttcgctagttataaaatgacgtcaaatcaatatcaaaaattatttaagtaaaatgtttagataatttttcagtgggtaagtattatatataacatttaattattccgaggaggcatttattatggcagacgaaagtaaatttgaacaagcaaaaggtaatgttaaagaaacagtaggtaatgttactgataataaaaatttagaaaacgaaggtaaagaagataaagcttctggtaaagcgaaagaattcgttgaaaatgcaaaagaaaaagcaactgattttattgataaagtaaaaggtaacaaaggcgagtaattttactttttattcctaatacactgcacatgccacttagtcggtataaccatcggctaggtggtttttgtattaaaaaagtggataccaaaatttattaataattattttaatgttagaaaaaaactaaataaaaactcgctaatgatatccaataatatgtatacaaaatgagacatatattgcatatgattaacgagatactgaatatattttatcacccctaaaatgattattcattttcagcggtaattcgacctaaagtcaaacttacaataaaaccgatgataaatactactaatgaaacgaaccacatcacgatgttagttggtaaacctggaaatactgcaaagagggagccaacaacaaaaccaatgattaatgcaaaagtcattagtttatgatgtgttaggaaatactggataattttgcttgaaataatgaatccagcaagcacgccaaatccgactgcaagtaatataggaagaccggtaaagttaagtttaacaacttcagatattgctagcatgaccgtaccatagacgccaaatactaataacataaatgatcctgaaatacctgggagtaacatagcgctagatgcacacatacctgcaataaagtatttaataataagaccagttgatagagtaagtgtttctccagcatgtttatcgccattattcattaatgtaataacaattaagatagcgataccagctataaccatcatgtaatgtttagttgtaaatgacgttttatagttagaaattttcaataaatatggaacgataccaatgattaatccaccaaagaaaaacatagttggaatatggtgttggcttaataaataattaaaaagattacttagtgatcccattgccagtaacattccaattataatggggattaaaaatgtaaaacttggccaaaaacgtcgtgagaatatgccgctaattgaagcgataaattgattgtaaatacctaacaataatgcgatagtcccaccgctaacaccaggtaccaagtcactcgttcccatagcaaaaccttttagaatattaatccatttaaattgttgcatgaataactcctttcaaacgattggaataaaatcataaatagaatcataccatattacaaatgtcctagtgaaatgataacatattttaaattcataaaatccattgagaaattatgtgcacttattatcatttatatttttaaagagagaggattagagttgtactttagagttattaaaaataataaaaagggtttaagttgtttatattaaggtataagtaagttataattaactgaacgcattattacaaagtctttttgactacaaattaaaattattataaactagttaagaaaactttatattttacggagggaatataaaatggcatcaacattagaaatcaaagacctacatgtgtctattgaggataaagaaatcttaaaaggtgttaacttgacaattaacactgatgaaatacatgcgattatgggaccaaacgggacaggtaaatcaactttatcatctgcaattatgggacatccaagctatgaagtaactaaaggagaagtacttttagacggtgtaaatattttagaattagaagttgatgaaagagcaaaagcaggattattcttggcaatgcaatatccatcagaaattacaggtgttacaaatgctgatttcatgcgttcagcaatcaatgcgaaacgtgaagaaggacaagaaatcaacttaatgcaatttattaagaaattagataaaaacatggattttctagacatagataaagacatggcacaacgttatttaaatgaaggtttctcaggtggagagaagaaacgtaacgaaatcttacaattaatgatgttagaacctaagtttgcaatcttagatgaaatcgattcaggattagacatcgatgcattaaaagttgtatctaaaggtattaaccaaatgcgtggggaaaactttggtgcattaatgattacacactatcaacgattattaaattacattactcctgataaagtacatgtaatgtatgctggtaaagtcgttaaatctggtggtccagaattagcaaaacgtcttgaagaagaaggatatgaatgggttaaagaagagttcggttcagctgaataatcttattaatacagtatccatgagatgttcatctatatatgatgaaaatgaacatttatacgaaatagtaaatttcatcaagtaggaggaaaaagttatgacaactgatattttgaacatttctgaagaacaacttgttgattattctaaagcccacaatgaaccttcttggatgacagaattacgtaaaaaagctttgaaattaacagaaactttagaaatgccaaaacctgataaaacaaaattaagaaaatgggattttgattcttttaaacaacacgatgtaaaaggtgatgtttatcaatctttatcacaattacctgagtcagtaagagaaattattgacgtagatcattctaaaaacttagtaattcaacataataatacgattgcgtacacacaagttgatgataatgcatcgaaagatggcgttatcgttgaaggtttagcagacgctcttatgaaccatagtgatttagtacaaaagtactttatgaaagatgcagtaacagtagatgaacatcgtatcacagcgctacacacggcattagttaatggtggcgtatttgtttatgttcctaaaaatgtagttgtagaacatccagtacaatacgttgtgttgcacgacgacgaaaatgcaagcttttataaccatgttatcatcgttactgaagaaagcgccgaagtcacatatgttgaaaattacttatcaaatgcatctggtgaaggaaatcaattaaatattatttctgaagtgattgctggtgcaaattcaaatatcacatatggctcagtggactatatggataaaggctttacaggtcatatcattcgacgtggtattactgaagcggatgcctcaattaattgggcactaggtttaatgaatgagggtagccaaattattgataatacaacaaatttatttggtgatcgttcaacaagttcacttaaatcagtagttgtaggtacaggcgaacaaaaaatcaatctaacatctaaaatcgtacaatatggtaaagaaacagatggttatatccttaaacatggtgttatgaaagaacatgcatcatctgtatttaatggtatcggctacattaagcatggtggaactaaatcaattgctaatcaggaatcacgtgtattaatgttatctgaacatgctcgtggtgacgcgaatcctattttattaattgatgaagatgatgtacaagctggtcatgctgcatcagtaggtcgtgttgatccagatcaactttactatttaatgagtcgtggtatttctcaaagagaagcggaacgtcttgttatacatggtttcttagatccagtagtacgtgaattacctatcgaagacgttaaacgtcaattgagagaagtaattgaacgcaaagtttctaaataatattttgaaaataaaagtttgtaatagatatagactgtcgatattggtataagactaatacaacgtcagtatttaaatgattaggatttttatttaagaaaggtcgtgaatgaagtggccgaacactcatttgacgttaatgaagtaatcaaggattttccgatattagatcaaaaagtcaatggcaaacgtttagcatatcttgattcaacagcgacaagtcaaacgcctgtgcaagtgttaaatgttttagaggattactacaagcgttataattcaaacgttcatcgtggtgttcatacattaggatcattggcaactgatggttatgaaaatgcccgtgaaaccgttcgtcgttttattaatgcgaagtattttgaagaaatcattttcacacgcggaacaactgcatcgattaaccttgtagcacatagctatggtgatgcaaatgttgaagagggcgatgaaattgttgtcactgaaatggaacatcatgccaatattgttccttggcaacagttagcaaagcgtaaaaatgcgacattgaaatttataccaatgacggctgacggtgaattaaacatcgaagatattaagcaaacgattaatgataaaacaaagatcgttgctattgcacatatttctaatgtactcggtacaattaatgatgttaaaaccattgcagaaatagctcatcaacatggtgcaattatcagtgttgatggggcgcaagcagcaccacatatgaaacttgatatgcaagaaatgaatgctgatttttatagttttagtggtcataaaatgcttggaccaacaggtattggcgtattatttggtaaacgtgagttactacaaaaaatggaaccgattgagttcggtggtgacatgattgattttgtaagtaagtatgatgcaacatgggctgatttacctactaaatttgaggcgggtactccattaattgctcaagcaattgggcttgcagaagctattcgctatttagaacgcataggttttgatgcaattcataaatatgaacaagaattaacgatatatgcttatgagcaaatgtctgcaattgaaggaattgaaatttatggcccgcctaaggatcgtcgtgcaggtgtaataacgtttaatttacaagatgtacatccacacgatgttgctacagccgtagatacagaaggtgtagcggttagagctgggcatcattgtgcgcaaccgttaatgaaatggttaaatgtgtcttcaacagctagagcgagtttttatatatacaacacgaaagaagacattgatcagttaataaatgccttgaaacaaacgaaggagtttttctcttatgaattttaataatctagatcaattatatagatctgtcattatggatcattataaaaatcctagaaataaaggtgtattagataacgggtctatgacagtagatatgaataacccgacatgcggtgaccgtatacgactaacatttgatatagaagaaggcattataaaagatgctaagtttgaaggtgaaggttgttcgatttcaatggcaagtgcatcgatgatgacacaagctgttaaaggtcattcacttggagaagcaatgcaaatgagccaagaatttacgaaaatgatgcttggtgaagactatgtgattacagaagaaatgggagatattgaagcattgcaaggtgtatctcaattcccagctcgtattaaatgtgccacattagcttggaaagcattggaaaaaggtactgttgctaaagaaggtaaagcagaaggtacgactgaagaagaatagaatgctgttaatcatagatgattttgatattagacatataaaagtataaaaatttttataagatgtcatgtcattgttataatatggtttacatcatgaattaaaaacttacgcacgccgttgtaaatatatttttaaggagtgattgaaatggctaaaaaagcacctgatgttggggattataaatatggattccacgacgatgatgtgtccattttcagatcagaacgtggtttaactgagaatatcgttagagaaatttctaacatgaaaaatgagccggaatggatgttagatttccgtcttaaatcattaaaattgttttataaaatgccaatgcctcaatggggtggcgacttatcagaattgaatttcgatgacattacttactatgtaaagccttcagaacaagctgaacgttcatgggatgaagtgccagaagaaattaaaagaactttcgataaattaggaattcctgaagctgaacaaaaatatttagctggtgtttctgctcaatatgaatctgaagttgtttaccataatatggaaaaagaacttgaagaaaaaggtattatctttaaagatacagatagtgctttacaagaaaatgaagaattattcaaaaaatactttgcttctgtagtacctgcagcagataacaaatttgcggcgttaaactcagcagtatggtcaggtggttcgttcatttatgtacctaaaaatatcaaactagatacgccactacaagcttatttccgtattaactctgagaacatgggtcaatttgaacgtacattaatcattgctgatgaaggtgcttctgtacattacgtagaaggttgtactgcaccagtttatacaactagttctttacactctgctgttgtggaaatcattgtgcataaagatgcgcacgttcgttatactacgattcaaaactgggcgaacaatgtatacaatttagttacaaaacgtacttttgtttatgaaaacggaaatatggaatgggtagatggtaacttaggttctaagttaacgatgaaatatccaaactgtgttcttttaggtgaaggtgcaaaaggtagtacattatctattgcatttgctggtaaaggacaagttcaagatgccggtgctaaaatgattcataaagcgccaaatacatcttcaacgattgtttctaaatctatttctaaaaatggtggtaaagttatttatcgtggtattgtacattttggacgtaaagcaaaaggtgctcgttcaaatattgaatgtgatacattaatcttagataacgaatcaacatcagatacaattccatataacgaagtattcaacgatcaaatatcattagaacatgaagccaaggtttcaaaagtttctgaagaacaattattctatctaatgagtcgtggtatttctgaagaagaagcgacagaaatgattgttatgggattcatcgaaccatttacaaaagaacttccaatggaatacgcggtcgaaatgaaccgtttaatcaagttcgaaatggaaggtagtattggatagctttaaaccgcgttgttaagccattcttaacttccgaaaatggctattgataccattttgatactgaatataacaaaaagccacattactgtggctttttttgttttataactaaatcggattgatagataagctttgtacttatttatatcagtccgattttttgattggtgtaaaaaataatcattgatggtggataaagcgacaacacaaatacaacatgattgtggcattagagtgctggtctttattaaattaattgaaagctacatcaaatattctttagataattcgatattagttcgattaagattcgttgtataagtgagttaaaataagaaaactattaataatattaagttcactacagatgttgctaatggaccataagttttaaagacatcttcacttttataaccaacaataacatctaaaaattgaacttagatcattgcaatggatatagttatcaaaaatatagcactatgaatgactaaagaaaaaatagctaataaaaataaaggtaagcttcgactaagtgcataatatgcatttatattatggctagatgcacatgcttgaattgaataacctaaacttacactggcactgattattgtaaatattgctaaaacaaaatacatgttaatccttctttctatatttggatataaacaagtacttgtctaaagttatttaaaagataattagaataaatttatgagaaacttattgttatcattataatggtttcaaatcattataactatgtcataaactgaatttgttaaaatttttcattatgtaaatttattaataacaaacagctcgaactatagcatcattttactaatgaatgcattaaagtaactataactaaaaatgcatattaattatcattattaagactattatatataatgaattttaactggtttattaaacgagaacgtcgggaattaagtaactacaataaaaataagatatgacaataaggagactacacgcgtgatcattgccataattatattgatatttatttcgtttttcttttcaggaagcgagacggcattaacggctgccaataaaacaaaatttaaaactgaagctgacaaaggtgataaaaaagcaaaaggcattgtaaagttacttgaaaaaccaagtgagtttattacaacgattctaattgggaataatgtcgcgaatattttattaccaacacttgttacaattatggctttacgttgggggattagcgttggtattgcatcagctgttttaacagttgttatcattttgatttccgaagtgattcccaagtctgtcgctgcaacatttccagataaaataacaaggcttgtatatccaattattaatatttgtgtcattgtgtttcgccctatcacattacttttaaataagttgacggacagtattaatcgaagtttatctaagggccaacctcaagaacatcaattttcaaaagaagaatttaaaacaatgttagcaattgctggacatgaaggtgctttaaatgaaattgagacgagtaggttggaaggtgtcattaattttgaaaatttaaaagtaaaagatgtagatacaacacctagaattaatgtgacggcatttgcttcaaatgcgacatacgaagaagtttatgaaacggttatgaataagccatacactagatatccagtgtacgagggagatattgataacattattggggtgtttcattctaaatatctgttggcttggagtaataaaaaagaagatcaaattacaaactattcagctaagccattatttgtgaatgaacacaataaagctgaatgggtattacgtaagatgactatttctagaaaacatttagcaattgtgttggacgaatttggtggtactgaagcgatagtgtcacatgaagacttaattgaagaattattaggtatggaaattgaagatgagatggataaaaaggaaaaagaaaaactttctcaacagcaaattcaatttcaacaacggaaaaatcgcaacgtatctatataaggagcgaacagctatgtggaataagaatcgacttactcaaatgttaagtattgaatatccaattatacaagcaggtatggcaggaagtacgacaccgaaattagttgcatcagtaagtaacagtggtgggttaggcacaataggcgcaggttactttaatacgcagcaattagaagatgaaatagattatgtacgccaattaacgtcaaattcttttggtgtaaatgtctttgtaccaagtcaacaatcatataccagtagtcaaattgaaaatatgaatgcttggttaaaaccttatcgacgcgcattaaatttagaagagccggttgtaaaaattaccgaagaacaacaatttaagtgtcatattgatacgataattaaaaagcaagtgcctgtatgttgttttacttttggaattccaagcgaacagattataagcaggttgaaagcagcgaatgtcaaacttataggtacagcaacaagtgttgatgaagctattgagaatgaaaaagcgggtatggatgctatcgttgctcaaggtagtgaagcaggtggacatcgtggttcatttttaaaacctaaaaatcaattacctatggttggaacaatatctttagtgccacaaattgtagatgtcgtttcaattccggtcattgccgctggtggaattatggacggtagaggagttttggcaagtattgtcttaggtgcagaaggggtacaaatgggcactgcatttttaacatcacaagatagtaatgcatcagaactactacgagacgcaattataaatagtaaagaaacagatacagtcattacaaaagcgtttagtggaaagcttgcacgcggtatcaacaataggtttattgaagaaatgtcccaatacgaaggcgatatcccagattatccaatacaaaatgagctaacaagtagcataagaaaagccgcagcaaacatcggcgacaaagagttaacacatatgtggagtggacaaagcccgcgactagcaacaacgcatcccgccaacaccatcatgtccaatataatcaatcaaattaatcaaatcatgcaatataaataatcgaatcgaccgcaatccacaaaagcacaagcacccccaaacattattttagtgcttgccatttttgtggattgcgtttctattttaccaatctagtcaaacgaaattatcgagctaaagttcgccgaaatgattatgatcaaacgaaattatcgagctaaagttcgctgaaatgattataatcaaacgaaatcatcaagctgaagatcactgaaatgattataatcaaacaaaaacatcaaacgaaagttcgctgaaatgattatgataaaagttatatggtatgatgacattggtgatatatatgataaacatcggattaacaggttggggtgatcactattcattatatgaagatttagaacgccaaaccgataaacttaaaacatatgctggacattttccggttgtcgaattagatgcgacatactatgcgatacaaccggaaagaaatatattgaaatggataaaagaaacgcctgatacatttgaatttgtggtcaaaattcatcaagcactcacattgcatgcagactacaaaacatttgcagatacaaggcaagaactatttgatcaatttaagaatatgttagagcccttacatacacagaaaaaattagcaatggtattggttcaatttccgccatggtttgactgcaatgcacaaaatatcaaatatattttgtatgtaagacagcaattacaagcatttccaatgtgtgtagaatttaggcatcaatcatggtttagtgatgcatttaaagaacaaacattggcatttttaacagaacatcaaatcattcatgcagtagttgatgaaccacaagtgaaagatggcagtgtacctttagtcaatcgaatcacaaatgaaattgcgtttgtacgttatcatggacgtaatcattacggttggacaaagaaagatatgtcagatcaagaatggcgagatgtgcgctatttatatgattataatgaacaagaattaatagacttggcacaaaaggcacaaatattagcacaaaaagctaagaaagtttacgtcatatttaacaataattctggtggtcatgcagcaaataatgccaaaacatatcagcgattattgaatatagaatatgaagggttagcaccacaacaattaaaattattttaagaggcgacgactatgttattaacaattacattattagttttaatcggaggtttgtcagcgattatagggtcaatcgtaggcattggaggcggtattattatcgttccaacaatggtttacctcggtgttgaacatggattactacataatattacaacacaagtagcgatagggacgtcttcagtcattctaattgtgacaggactttcttcatcacttggatatctaaaaacaaaacaagttgatattaaaaatggttccatctttttatttggactactaccaggttcattgcttgggtccttcattagtagatatttaacatttgagtcatttaatttatattttggtatctttttaattttcgtagccattttattaatggtaagaaataagattaaaccgtttaaaattttcgataaacccaagtatgaaaagacttatgtagatgctaaaggtaaaacatatcattatagtgtaccgcctttattcgcttttgttactacatttttaattggtattttgacaggtttatttggtattggaggtggcgcacttatgacgccactaatgcttattgtatttagatttccacctcatgtagctgttggaacaagtatgatgatgattttcttttcaagtgtcatgagttctatagggcacattgctcaaggtcacgtagcttggggttatgcaatcattttaattatatctagttatgttggtgcgaaaatcggtgtcaaagtgaatcaatcaattaagtcagatacagtagtaacattattgagaacagtaatgttgttaatgggtatatatttaattattcgtgcgttgatttaatacaactttaaaaggaggacgtcaatttgaggcttacaatttatcatacgaacgatattcatagtcatttacatgaatacgaacgcattaaagcatatatggcagaacatcggccacgacttaaccatccttctttatatgttgatctaggtgatcatgtagatttatccgcacctataactgaagcaactttaggtaaaaagaatgtggcattactaaatgaagcaaaatgtgatgttgcaacaatcggtaataatgaagggatgaccattgcacacgaagctttaaatcacctttacgacgaagcaaaatttatagtgacatgtagcaatgttatagatgaatcaggtcatttgccaaataatatcgtttcttcttatattaaggacatagacggtgtgaaaatactattcgttgcagcgacagcaccttttaccccattttatcgtgcactagattggattgttaccgatccacttgaatctataaaagaagaaattgaacatcaacgaggtaaatttgatgtattaatcgtgctaagtcattgtggcattttcttcgatgaaacattatgccaagaattgcctgaaattgatgtcatttttggtagtcatacgcatcattattttgaacatggtgaaatcaataatggtgtactgatggcggcagctggaaagtatggtaattatcttggagaggttaatttaacttttgaggcacataaagtagtacataaaactgcaaaaattattcctttagaaacattacctgaagttaaaacttcatttgaagaagaaggaaaaacgctaatgtccaatccagtaattcaacatccagtagtgcttaagcgtagtatgaaccacataactgaagctgcatacttattagctcaaagtgtttgtgagtatacacatgcacaatgtgccatcatcaatgctggcttactcgttaaagatattgtaaaagatgaagtgacagaatatgacattcatcaaatgttaccgcatccgattaatatggtaagggttagactttctggtgtgaaattaaaagagattatagctaaaagtaataagcaagaatatatgtatgaacatgcacaaggtttgggtttcagagggaatatatttggaggatatattctttataatttagggtacattcattctacagggcgttactatctgaatggagaagaaatcgaagacgacaaagaatatgtactaggtacgatagatatgtatacgttcggtcgttatttcccaacattgaaagaattaccaaaagagtatttaatgccagagtttttaagagatatatttaaagaaaaattattggaatattaaaaagtaagattattggattttcatttgtcatgaatttcgatataatgtttaaagatacacttaacaggagggtatgtgttgttatggcgacaaaaaacgaggaaatattacgtaaaccggattggttgaaaataaaattaaataccaacgaaaactatacaggacttaagaagatgatgagggaaaaaaatcttaatactgtatgtgaagaagctaaatgtcctaatatacatgaatgttggggtgcacgtcgtacagcgacatttatgattttaggtgccgtatgtacaagagcttgtcgtttttgtgcggttaagacaggtttacctaatgaacttgatttaaatgagcctgaacgtgtagctgaatcagttgaattaatgaacttgaaacacgttgttatcactgctgttgcgcgtgatgatttaagagatgctggttcaaatgtttatgctgagacagtacgtaaagttagagaaagaaatccatttacaacgattgaaattttaccatcagatatgggcggggactatgatgcgttagaaacattaatggcatcaagacctgacattttaaaccataatattgaaactgttcgtcgcttaacaccgagagttcgtgcgcgtgcgacttacgacagaacattagagtttttacgtcgttcaaaagaattacaaccggatatcccaactaaatcaagtattatggttggattaggtgaaactatagaagaaatttatgaaacgatggatgatttacgtgcgaatgatgtagatattttaacgattggtcaatatttacaaccttcacgtaaacatttaaaggttcaaaaatattacacgcctttagagtttggtaaattaagaaaagtggcaatggataaagggtttaaacattgtcaagctggacctttagtacgtagttcttatcatgcggatgagcaagtaaatgaagctgctaaagaaaagcaacgccaaggtgaggcacagttaaatagttaatatttaaccattaataaggcataaaggcttagtttatacaaaacgaacgtgtcatagaagtaatcattatttttatgaaacactaaaagtataaactgagcctttcattgtcatagataggtgaagaatttgataaaagtagatcaacattactttgaattaatagaaaattatcgcgaatgttttaatgaagaacaatttattgctaggtattcagatattttagataaatatgattacatagttggtgactatggttacgatcaattacgattaaaaggtttttacaaagattctaataaaaaagcagagatgagtaaacgtttttcaaatattcaagattacatatttgaatattgtaactttggttgtccttactttgtattaagacatttgtctaaacaagaggttaaaaagttaatcgaagaagttcatccgtctgatgtgatagatgacgacaataaacttcaagatgtgaagattaagccaaccattcaagatactgaacattaataaaacccttagctagattgaaaatgggaatcatgcaattcaagcatggacctgtaatctagttaggggtttttatctttaatgaatgacttcatttaaatactcagtaatttcatcgccttcttcagcatttacacctaaaatatgagcgatatagccttcttcttttaaatcatcagtaccgataataccgaatttatttgtttgcatattaagtacgagtgtcttaccataatgtctatttgtatggactaacattaaatcatatcgactatgctcgccaacaaaaccaacaaactgaacttgactctcttcgttgtcatcatataaatacatatcaatcattttgtagcgactccttttaaaagtagtaaagttagtataacgacaaatgaagtatactgcaaaattatgataatatataagcgagaggtgacaaggaatgtattttgtagacaaagataaactaactcagaaattagcctatttacaagcattaactgatgattatcatgagagcaagcacaatcattatgcatttgaacgcattgctcaaatgttgatagaatcatcggtagatatagggaatatgattatcgatgcatttattttaagggatcctggtaattataaagatgtgattgatatattagaactagaaaatgttattactaaagaaacacagcaggagattaataaaactgtcgatattcgtaaacaatttacatatgattacacagccttagatactaaggttatcatgccaatgtttgatgacgcattaccttattacaaacaatttattacagaagtaacgacatttttacatcaagaaaatgtaccagtaacagcttttggtaaaggagaaaatcaataatgaaacagtataaagcgtatttaatcgatttagatggcacaatgtatatgggaacagatgagattgatggagcaaaacaattcatcgattatttaaatgtaaaaggcattcctcatttatacgtaactaataattcaacaaaaacacctgagcaagtaactgaaaaattacgtgaaatgcacattgatgctaaaccagaagaggttgtaacgtcagcgttagccactgctgattatatttcagaacaatcaccaggagcatcagtatatatgttaggtgggagtggtttaaatactgcgttaaccgaagcgggtcttgtcattaaaaatgacgagcatgttgattatgtagttattggacttgacgaacaagttacatatgaaaagcttgcgattgcaacgttaggtgtaagaaatggtgcaacatttatttctacaaatcctgatgtatcaattcctaaagagcgtggtttattacctggtaatggtgctattacaagtgttgtaagtgtatcgacaggtgtatcgccacaatttattggtaaaccagaaccgattattatggttaaagcattagaaattttaggattagataaatccgaagttgctatggtaggcgatttgtacgataccgatattatgtctggtattaacgtaggtatggatacgattcatgtacaaacaggtgtatctacgttagaagatgtgcaaaataaaaatgtgccaccaacgtattcttttaaagatttaaatgaagcaatagctgaattagaaaaatagatatagtcattttataaagtaggtgaattgatttggtaaaaatagttgtttcgaggaaaattccagataaattttatcaacaattaagtaaacttggtgacgttgttatgtggcaaaaatcattagtgcctatgcctaaagatcaatttgtgacagcacttcgtgacgcagatgcttgttttatcacattaagtgaacagatcgatgcagaaattttagcacaatcaccaaatttaaaagtaattgcgaatatggctgtaggatatgacaacatcgatgttgaaagtgcaacagcgaataacgtggttgtcacgaatacaccaaatgtacttactgaaacaactgcagaattaggatttacattaatgcttgctacagcacgccgtattgtagaagctgaaaaatatgtagaagcagatgcatggcaaagctggggtccttatttattgtcaggtaaagacgtcttcaattcaactattggaatatatggtatgggagatattggtaaagcttttgcaagaaggttgcaagggtttaatactaatattctttatcataatcgatcaagacataaagatgcagaggcggactttaatgcaacatatgtttcttttgaaaagctgttagcagaaagtgattttatcatctgtacagcgccacttacaaaagaaacacatcataaatttaatgctgaagcatttgaacaaatgaaaaatgatgcaatttttattaatatcggtagagggcaaattgtagatgaaacagcattaatcgatgcactagacaataaagaaattttagcatgtggtttagatgtattagcaaatgaaccgattgatcatacacatccattaatgggacgtgataatgttctgattacaccacacattggtagcgcatcagtaacaacacgggacaatatgattcaattatgtattaataatatagaagcggttatgacaaatcaggtaccacatactccagtaaattgaaaataagtatggtttttaatcattggtaaaacaagcaaagcaattgttaaatatgttatgcttgacttgcgaatgtatatatttgcgctgatgataattcaataacattataaactcgtcatattaatgtgatgagtttatttgattttgacgtatataacaaaattgttatatagactgtaattgtttattgtttaaataacctttaaaatgaatgatgttctcaacaaagtgtatcatttacaataattgaatgatgacaaccaattactatgttgaatctataaaattaaaattgaatttcattatgaatatcgatataatgaattgtaaaaaacaaattttaaaacgtattttatattgaacggtctttataaaggcgtttttactaagaactttaagaggtgcaatatgaaatctaaaagtaaacagccacctaataaatatgttgaagcattcaaaccatatttattaacactattgtatttggcaatatttattactttatatttaatttatggcagtggcgacacacacaataacttcatttataatgagttctaatgagggagacttaatatgacagatattattaacaagctgcaagcgtttgcggatgcaaatccacaaagcattgctgttagacacacaactgatgaattaacttatcaacagttaatggatgagtctagtaaattagcacatcgattacaaggtagtaagaaaccgatgattttattcggtcacatgtcaccatatatgattgttgggatgattggtgccattaaagcaggatgtggatatgtacctgtagacacttcaattcctgaagaccgtattaaaatgattattaacaaggttcaaccagagtttgtatttaatacgactgatgaatcatttgaaagtttagaaggcgaagtatttacaatagaagatattaaaacatctcaagacccagtaatttttgatagtcagattaaagataacgacacagtatacacaatctttacatctggttctactggggaacctaaaggtgttcaaattgaatatgcaagtttagttcaatttactgagtggatgttagaacttaataaatcaggaaatgaacaacaatggcttaaccaagcgccattttcatttgatttatctgtaatggctatttatccatgtttagcatcaggcggtacattaaatcttgtagataaaaacatgattaataaacctaaattattaaatgaaatgctaacagcaacaccgattaacatttgggtatcaacaccatcatttatggaaatgtgtttattattaccaacgcttaatgaagaacaatatggtagtcttaacgaattcttcttctgtggtgaaattctacctcacagagcagcaaaagcgttagtaaaccgtttcccaagtgcgacgatttacaacacatatggtccaactgaagctacggtagcagttacaagtattcaaattacacaagaaatcttagatcaatatccgacattacctgttggcgttgaaagaccaggcgcaagattatctactacagatgacggtgaacttgttatcgaaggtcaaagtgtaagtttaggatacttaaaaaatgaccaaaaaacagctgaagtatttaatttcgatgacggtattcgtacatatcacactggtgataaagcgaagtttgaaaatggtcaatggttcattcaaggtcgtattgatttccaaatcaaattgaatggctacagaatggaattagaagaaattgaaacacaattacgccagtctgagttcgtaaaagaagcgattgttgtacctgtatataaaaatgataaagttattcatttaattggtgcaattgtgccaacgactgaagttacggacaatgcagaaatgactaaaaatattaaaaatgacttgaaatcacgcttaccagagtatatgattcctagaaagtttgaatggatggaacaattgccattgacttcaaatggtaaaattgacagaaagaaaattgcagaggtaattaacggatgattccatatggtgattttacattcttcttaattgctttaattgcattattaccagtcattatacttggatttttaggtaagcgaagttacatttataatggcgtagttacagcatttatgattgtgttaatcttttcttctgataaacataatctgtttgaccaaaagtatttaagtgttcaattaattagttttattatttatgtcgtatggcaagttttattgataatgttttattatcattcaaaaccaaaaaataattcattttcaaaatttgtaactgtaatggttttatcaatattgccattagcacttgtgaaagtgttacaaagtacatggttaggtggacatcagattcacttccatgaaagtaaattaattgaatttgttggtttcttaggaatttcttatgttacattcaaaagtgtgcagttaattatggaaattcgtgatggttctatcaaagaaattaaagtatggaaattaattcaatttatttcattcttcccaacgatttcatctggaccaatcgatcgttacaaacgtttcgttaaagacgataaaaaagtaccaacaggcaatgaatatcgtgaattagtattaaaagcaattcacatgattatgcttggtttcttgtataaatatattgttgcttactttattaacacatatgcaatcatgccgttacaattagacttacatggctttgtcaatttgtggttatatatgtacgcatacagcttatatttattctttgactttgcaggttatagtttatttgcgatagcatttagttatttattcggtattaaaacaccaccaaacttcgataaacctttcaaagcgaaaaatattaaagatttctggaatagatggcatatgacattatcattctggttcagagattgtatttacatgagatctttattctacatgtctcgtaaaaaattattgaagagtcaatttgcaatgtctaacgtggcattcttaatcaacttcttcataatgggaatttggcatggtatcgaagtgtattacattgtttatggtttataccatgcagcattgtttataggttatggctattatgaacgttggcgtaagaaacatccgccacgttggcaaaatggtttcacaacagcacttagcattgtgattacattccactttgtaacatttggctttttaatcttctcaggtaaacttatataataaaggagaatttaattatggaatttagagaacaagtattaaatttattagcagaagtagcagaaaatgatattgtaaaagaaaatccagacgtagaaatttttgaagaaggtattattgattctttccaaacagttggattattattagagattcaaaataaacttgatatcgaagtatctattatggactttgatagagatgagtgggcaacaccaaataaaatcgttgaagcattagaagagttacgatgaaattaaaaccttttttacccattttaattagtggagcggtattcattgtctttctattattacctgctagttggtttacaggattagtaaatgaaaagactgtagaagataatagaacttcattgacagatcaagtactaaaaggcacactcattcaagataagttatacgaatcaaacaagtattatcctatatacggctctagtgaattaggtaaagatgacccatttaatcctgcaattgcattaaataagcataacgccaacaaaaaagcattcttattaggtgctggtggttctacagacttaattaacgcagttgaacttgcatcacagtatgataaattaaaaggtaagaaattaacatttattatttcaccacaatggtttacaaaccatggtttaacgaatcaaaactttgatgctcgtatgtctcaaactcaaattaatcaaatgttccagcagaaaaacatgtctactgaattaaaacgtcgttatgcacaacgtttattacagtttccacatgtacacaataaagaatacttgaaatcttatgctaaaaaccctaaagaaactaaagatagttatatttctggttttaaagagaatcaattgattaaaatagaagcgattaaatcattgtttgcaatggataaatctccattagaacatgttaaacctgctacaaaaccagatgcttcttgggatgagatgaaacaaaaagcagttgaaattggtaaagctgatactacatcgaataaatttggtattagagatcaatactggaaattaattcaagaaagtaagcgtaaagttagacgtgactacgaattcaatgttaattctccagaattccaagatttagaattacttgtaaaaacaatgcgtgctgctggtgcagatgttcaatatgtaagtattccatcaaacggtgtatggtatgaccacattggtatcgataaagaacgtcgtcaagcagtttataaaaaaatccattctactgttgtagataatggtggtaaaatttacgatatgactgataaagattatgaaaaatatgttatcagtgatgccgtacacatcggttggaaaggttgggtttatatggatgagcaaattgcgaaacatatgaaaggtgaaccacaacctgaagtagataaacctaaaaattaaaatacaaatagcacataactcaacgattttgattgagcgtatgtgctatttttatattttaaatttcatagaatagaatagtaatatgtgcttggatatgtggcaataataaaataattaatcagataaatagtataaaataactttcccatcagtccaatttgacagcgaaaaaagacaggtaataactgattataaataattcagtattcctgtctttgttgttattcataatatgttctgttaacttaatatctttatattagaatacttgttctacttctattacaccaggcacttcttcgtgtaatgcacgctcaataccagctttaagagtgattgtagaacttgggcatgtaccacatgcaccatgtaattgtaatttaacaataccgtcttccacgtcaatcaatgagcagtcgccaccatcacgtaataaaaatggacgaagacgttcaataacttctgctacttgatcaaacatcgttgtatcttcagtaggcatcaggcaagtctcctttcgagagatgaatttgataatctttattagtatattataatagatagtgtaataaaaatctatcaaaccaatgggggataaatatatggagcacgtgagtgtggtagtatatggggcagatgttatatgtgcaagttgcgttaatgcgccaacatcgaaagatatttatgactggctacagccgctattaaaaagaaaatacccaaatatatcatttaaatatacgtatatagatattacaaaagataatgacaacttaacagatcatgatttacaatttattgaaagaatagaacaagatgaactattttatccattaattacaatgaacgatgaatatgtagcagatggttatatacaaacaaagcaaatcactcgatttatagaccaaaagcttgtgaatgaataatatacacataactaaaagcaatgtcagtaatagtgtgaactgacattgctttttaattttaaccattatgatatttatataaccaaagtacgccggattttaaaatagaagcgagtcgtcctgttacagtgcggtccatgatatatgcaaaaccttgcttatctcctaatgacccaacgataccttgtacctttagttccggcattttgtcaggtaatggttcatttagccattgctttttaagcacatcggcaatttgatcaccttgaacttcggctaactgagcacttggcgcatgtggtaaatcagcacaatcaccaactacatagacgttacgatatgttggtacttgatgatactggttaactatcacgcgtccattactatttatatcaatcggcaagttacgaacaacttcaacaggttgaattcctgctgtccatacaactaaatcaatatctttaggttcatcacagttatatattttaccaggttcaactttattaatatttgaatttggaacaacggtaacattatttttggcgaaccatttcgcaacatacttacttaatttttctggaaaatttcttaaaattcgcggcccacggtcataaagatatatttccaagtctgatctactttctcttaattcgctggcaagttctatgccgcttaatccagcaccaacgataccaactttagcaccttctggtagttcactaatactatggaaagtatcccgagcctttgagagtgtttgaatactatgtgtatattcttcggctcctggaacgttatgatacttatcttcacatcctaaaccaatgattagctcatcataatcaattttagaattaccgactgagacaatttgagcatctaaatctatgtcgttaatttcaccataaactgtattcacttgtggatgattagggaatttcatgcgaacatctttatctgatttcgtgcccgcagctaaagcataaaattctggtttcaatccatgaaatggcatacgatcaactaatgtgactgtataatcttgtggtaaagaagtagttaaaatgcgtgacatgatacgcatattaccatatccgccgcctaacaaaactaagtttttcataatgaagtaccccttttatatgttaatatttactttaattttgaaaagatcaaagtgcatagatatatttgttaatgaacagttataaaatgcaagtgtctttgattcatcaataacccctaaaaaagtaaatatgtatttatatgcttattatatatttttttgaaaatgactacaaataaatatttgtactaactaaggcactattacataactgggataagaaacatcagttgttggtaattgagcacatcatgttaaaataccagttttaaaatgctataatattgtaacaaatgaaataagaaggtgaagtatgaatccgatcgtagaattttgtctctctaacatggcaaaaggtggagattatgtttttaatcaactggaaaatgacccagatgtcgatgtgttagagtatggttgcctgacacattgtggtatatgttcagccgggttgtatgctttagtaaatggtgatattgttgaaggtgattcgccggaagaattattacaaaatatatatgcacatataaaagaaacttggattttttaaggaggagttatcatgccaacagttatattaacagaagcagctgcttacgaagtaaaagatatgcttaaagcaaatgaaatgccaggtggctatttaaaaattaaagtgaatggtggcgggtgcactggtttaacatacggtatgggtgcagaagaagcgcctggtgaaaatgatgaagtcttagaatactttggattaaaagtattagtagacaaaaaagatgcacccgtattaaatggtacgactattgattttaagcaatcattaatgggtggcggtttccaaatcgacaatcctaatgcaattgcttcatgtggctgtggtagttcatttagaactgcaaaagttgcaggtaatcctgaaaattgctaataaaataactttaaatggttaacccaatttttgggatacaaattgatatcaattatgattagggacatatttgattatgtcctatttttgcgtaaagatattttgttttattaaaaagcttattgaaaattaagaatctgactataaatagtaatttaaatgatcgtgataacggatacatttttaatcgaaatcaggctacgaaaaaattaattaattttttcacaatctgactgaatcttgcttgaaaatataacataaaagctatagaattagtattggattaaaaatgtcttttttgtgaacatcacaggtttttacataatttaaaagacttaaataacaaaatgatgataaactagtatacattgtggtaaaagtagtaatgaccagttgttactagtaattatcagcatttggttaaaaaaatatgaaagcttaggtgaaattaaatggctcaagatcgtaaaaaagtacttgtacttggtgctggttatgcaggtttacaaactgtaactaaattgcaaaaagcgatatcaacagaagaagcagaaattacgcttattaataaaaatgaatatcactatgaagcaacatggttacatgaagcatcagcaggtacactaaactatgaagatgtattatatcctgtggaaagtgtcttgaagaaagacaaagtgaactttgttcaagcagaagtaacaaaaattgaccgtgatgctaaaaaggtagaaacaaatcaaggtatttatgactttgatattttagtagtagcattaggtttcgttagtgaaacattcggcatcgaaggtatgaaagatcatgctttccaaattgaaaatgttatcacagcacgtgaattatcacgtcatatcgaagacaaatttgctaactatgcagcatcaaaagaaaaagatgataacgatttatctatcttagttggtggtgctggattcactggtgttgaattcttaggtgaattaacagacagaattcctgaattatgtagcaaatatggtgtggatcaaaataaagttaaaatcacttgtgttgaagcagcacctaaaatgttaccaatgttctcagaagaattagttaaccacgcagttagctacttagaagaccgcggtgttgaatttaaaattgctacaccaatcgttgcttgtaacgaaaaaggttttgtagttgaagtagatggtgaaaaacaacaattaaatgcaggtacttcagtatgggcagctggtgtacgtggtagtaaattaatggaagaatcatttgaaggcgttaaacgtggacgtatcgttacaaagcaagatttaacaatcaatggttacgacaacatttttgttattggtgactgttcagcgtttatcccagctggagaagaacgtccattaccaactacagcacaaattgcaatgcaacaaggtgaaagtgttgctaaaaacattaaacgcatcttaaacggtgaatcaactgaagaattcgaatacgttgatcgtggaactgtttgctctttaggttcgcatgacggtgtaggtatggtatttggtaaacctatcgctggtaaaaaagcagcattcatgaaaaaagtgattgatacacgtgcggtattcaaaatcggtggtatcggtttagcattcaaaaaaggtaaattctaggctttaaataaagtttcagctaaacacataaaattaaattattcatttataaagtccttcagtgtcactgaagggctttattgttgtacaatttgaagtgagtaacatatcaaatctaaggaggtacattatgaattttaaattaaataacacactaagcaacgaaataaatacattgattattggtataccagaacatttaaatcagttagagcgcattagttttaatcatatcgatattacagaatcacttgaaagactaaaacttcaacatattattggtagtaaagttgggaagatttatacaactgcatttgatgtacaagatcaaacatatcgtttaattacagttggtttaggaaacttaaagacacgtagttatcaagatatgttgaaaatatggggacatcttttccaatacataaagtcagaacacattgaagatacgtatttacttatggattcatttatttcaaaatatgatcagttatcagatgtattaatggcatgcggtattcaaagtgagcgtgcaacatatgaattcgatcattataaatcaagtaagaaggcaccgtttaagacgaatttaaaccttattagtgaatcattaattgaattagattttattcatgagggtatcagtattggccaatccattaatttggcaagagactttagtaatatgccaccgaatgtattaacaccacaaacatttgcagaagatattgttaatcattttaaaaatacaaaggtcaaagtagatgttaaagattatgacactttagtttctgaaggattcggacttttacaagcagtaggtaaaggtagtaagcataaaccgagattagtaaccatcacatataatggcaaagacaaagatgtagcaccaattgccttagttggtaaaggtataacgtatgattctggtggttatagtattaaaacgaagaatggcatggctacaatgaagtttgacatgtgtggcgctgcgaatgtcgttggtatcattgaagcggctagtcgtttacaactgcctgtaaatattgtcggagtgcttgcttgtgctgaaaatatgataaatgaagcatcaatgaagccagatgatgtatttacagcattaagtggtgaaactgtagaagtaatgaatacagacgctgaaggtagattagtccttgcagatgctgtgtattatgcaaatcaatatcagcctagtgtgattatggactttgctacattaacgggtgcagccatcgttgcactaggcgatgataaagctgctgcatttgaatcgaatagtaaagtgatattaaacgatatattacaaataagttctaaagtcgatgaaatggtatttgaattaccgattactgcaaccgaacgtgcaagtattaatcacagtgatatcgctgatttagttaaccatacgaatggacaaggtaaagcgctatttgcggcaagttttgtaacacattttagtggtcaaacacctcacattcatttcgatattgcaggtccagcaacgactaataaagcttcatataatggtccaaaagggccaacaggatttatgattccgacgatagtacaatggttaaaacaacaataatttaattatttgcctgatacaacttgtgtcttgatatacatttctaatttaactcttgaaagtataaaggatcgcattgtatcaggcattttcattgttgtaagaaaatataaatcgcatatccttgtgagcataaatcaacttgactagcattgcaaaaaaatattataagcatatgttcattcagtcaacgactactaatattgcattttagaacttaggattttgattggtgttccaagcttgtaaaattgtttaatttaatgaaagctaaaattattttaagaaagacaattaactaaaaaataaagattattggtatagtttgctattgacaggtgttaaagctactgatactatgtagtctataaacgctttagttcgatagagtgataaaggatggttgtcatatgataaatgcagtagtaatagcagtaattttaatgattgtgctatgtttatgtcgattaaacgtagttataagcttatttatcagtgcgctagttagtggcttaatttcaggcatgagcattgaaaaagttataaatgtatttggggaaaatatagtcgatggtgctgaggtagcattaagctatgctttattaggtggatttgcagcattaatttcatacagtggtatcacagactatttagtaggaaaaattataaatgcaattcacgctgaaaatagtcgatggtcaagagttaaagtcaaagtgacaataatcattgcattattagctatgagtatcatgagtcaaaacttaattcctgtacatattgcattcattccaattgtcatcccaccattgttaagtctgtttaatgacttaaaaatagatagacgtttaatcggtttgattatcggttttggtttatgtttcccgtatgtgttattaccatatggattcggtcaaattttccagcaaattattcaaagtggctttgcaaaggcgaatcacccaattgagtttaatatgatttggaaagcaatgcttattccttcaatggggtatattgttggcttacttatcggtttatatgtatatcgtaaaccacgtgaatatgaaacacgtaaaatttcagatagtgacaatgttacagagttaaaaccatatatcttaatagtaacaattgtagcaatactagctacatttttagtacaaacatttacagattcaatgatttttggtgcactggcaggggtactcgtattctttatttcacgtgcatataattggtatgaattagatgctaagtttgttgaaggtattaaaattatggcttatattggtgtagttattttaacagcaaatggatttgctggtgtaatgaatgctactggtgatatagatgaattagttaaaactttaacaagtattactggtgataataaattatttagcattatcatgatgtatgtgataggtttaattgtcactttaggtattggatcatcatttgcaacaattcctattatcgcatcattattcattccttttggagcgtcaattggactagatacaatggcattaatcgcattgattggaacagcgagtgcattaggtgactcaggttcacctgcaagtgattcaacattaggaccaactgcgggattaaatgttgatggccaacatgatcatatacgcgatacatgtgtaccaaacttcttgttttataatattcctttaatgattttcggtactattgctgctatggtactataagcataaagaggtgaaaatatgactcatttattagagacatttgagatgtcaatagatcaccaggaagatggtttagttgttatttctatgcctgttactgataaagtaaaacaaccatttggatatttacatggtggtgcttcgattgctttaggtgaaacagcatgttcattaggatctgctaatctaattgatacaaccaaatttattccattaggtttagagatgaatgccaatcatattcattctgctaaagatggtcatgttactgcgacagctgaaattattcatcaaggtaagtcgacacatgtatgggatataaaaattaagaatgacaaagaacaattaattacagttatgcgtggtacagttgctattaagcctttaaaataaaagaactgctagctgaaatgttatgagatattcataactacggctagcagtttttttatgcgctatattgttgtaattttagaaatgcttgttcaatgcgttcggcagctttacggccacccataacatttctaccaaatggtcctaattctaagtctgcaaagcatcctgcgacaaatagatttggtatccattctaatttttcggaaataacagggtaattacattcgttgataggtgcatcataattttgtattaattgcttaataagtggttgtgacataaaatcttgttcaaaaccagttgcaaccataatctgttgatatggaactgaattattttcagtgttaattaaaccatcactaatttgagtgataggtgttttatgcacatttatacgaccatttttaatatgttttttaaggcgtaagtacagttcgtgaggcattgatcctttatgacgttcacgttgtacaatggcatttctttcaggcatgcttttagtacttaaaaatgtagacatattcttcggacctaaccaaccaggatcagcatcaaagtcatgtatttcaatatctttatttagccataaatgaatctttttatcgttatcatgatttaacaatttaagtgcaagatgtgcagccgtaatgccactaccaacgatatgatcggtcttatcatatactacttgatcatgttctttctcgaagatatgatttacattctgtttgtcttttaaaatgtcaggcataaacggaatatttgtactacctattgcaataacgacgcaatctgtagtgataatttgtccatcttctaacttgatatgccatttgtcttcttgtttatctaaagtttgaactaaaccttgaaccaagcaatcctctaattgatattgtttagaagcatgtgcaatatgatccataaacattgtcaattcaggtcgttgataaggaccataaaaagcatttgtatattggtgctgtttagcgaattgttttagatggaacggttgtggatgtacgtgatgtacaatcggtgatcttaaataaggcatttctattcgatttgtaaatgagttaaacctttggcaaaaagtttcgtgtgggtcaatgattgttaatcggtctgttgttaatccgcttgataatagtttttgtgcgattgcagttccctgtatgccaccgccgataattgtccaatgcataataaaacctctctctttttaaagcgtaatcgttacgatttataattattattatcataatacataacgacatgaaaggcaattaaattaaagagatatatgtagatagggcgaagctgtagtcaaagaaaaaaccattgaaaaagaggtaacaatgtcaaaagaaaacagcagtaaaatcattcctaatttggaatcatcttactgctgtttgttgttgatttatattcatgattttgttatataatctacaattttgtgtcttttaagtcttctgaaatttcatcgactttagtctttttagtataaggcgttttaatattatatgctgctttcataatcatatgacttgaaagaggacctgtaattaatacaaagataatcgcaacgattaattgcatatttacaaaaccttgagtagcaataaaatataaaaacgtaccaaatagtaatgacattgcacctaatgttgatgcttttccggcagcatgtgcacgtgaatatacatcttcaagtctcaataatcctatagctgccagggcgctaattaaagcaccgatgataacaaagataagtgcaagactaatcagtatgattttgatcatgttcaatcaccttacctttgtccataaatttagagaatactgcagtacctaaaaaagctaatataccaatcatcataataacgacaatcatgtatttaatatttaataaaatactgaataatgctataactgccattaattgaagaccaatcgcatctaatgcgacaacacgatcggcaagtgatgggcctagcacaacgcgaatgagcatagctaacatagaaatgacaactatgattaatgcaataacgataataacattatgattcattatatttcgcccacctctcttacaattttctctaatgatgttttaatactttctacttcttgctctttagttgaaaaatctatggcatgaatataaatttttgtacgatcgtcacttacaccaagcactacagtaccaggtgttaatgtaattaaattagacagcaaaacaatttgccaatctttttttaaatctgtgtgataaacaaagaatcctggttcatttttaatcgaaggtttaataataattttcaaaacatcaaaattagctttaatcagttcgattaagaaaataataactaatttaataatacgatatagcgtgatgacataaaatctacctggtaacactctgtgtaagaggtaaacaagaactaggccaaagatgaaacctaacacaaagttatttgttgtgtaactatttgttacaaacaaccaaaacactgcgataataaagtttaatactaattgtacagccatgttatttacctcctaatacagctttaacgtaggttgatggattgtagaatgtttctgcaccagcttttaccattggatataagtaatctgctgacaatccatataaaacagttatcacaactgcaacgattgcaatcgtagttaaatatttgacgtcgactttgttattaagatcatatccttttggttgaccgaaaaagccttgtaggaatatgcgaatgacagaatataatacgactaaacttgataataagacaatgacaccacttaaataaaatcctctttcaaatgttgattggacaatgaaaaattttccataaaagccactgagtgggggaatgccagctaaacttaatgctgcgataaagaatgaccaaccaagtacaggatatcgtttaattaagccaccaaattgtcttaaatcagcagtgcctgtaattttaatcataattccgataagcaagaataatgcaagttttactaacatgtcgtgcaatgtatagtaaatagccccaatcatacctgactctgtcatcattgcaacgccgactaagatcacacctacagcaatcatgacattgtataggatgatttttttaatgttggcatatgcaacagcaccgacacaaccaaagatgatcgttaatagtgctaagaataaaatgacataatgtgaaaagcttacattatcactaaagaataggctcaatgttctagcgattgcataaacaccaacttttgttaacaaagcaccaaagaatgcaatgattggaattggtggtgcatagtatgcactaggtaaccaaacaaacattgggaatacgccagcttttgtagcaaaaacaaagataaatagtatgaaaacgatattgactaagccactgtcatgcgctgaaaggttagctaatttattgcttatatctgctagattcaatgttcctactactgaatataaaatcgctacacccattacgaagaaggatgacgatacaacgttaacaagaacatattttattgtttcttgtagttgaatttttgtagaaccaattactaataagaaataagatgacattaaaaatacttcgaaaaatacgaataggttgaaaatgtcaccagttgtgaatgcaccaatgatacctattaacataaatagtactgaaaaataataataatatctttcacgttcaataccaattgtttggtatgaatataaaatcacaatagctgtaataataatactagtaattattagtagcgcactgaatatgtctaatacaaagacaatactgtatggtgctttccatgaacctagctctacgcgtattggtccatgtttaacaacatttgctaaattgataattgccgcgaccaaggttaataatgtaccgcctagtgcgacataacgctttataataggacgctttccaataaagacaagtaatatggctgtaattactggaataactagcgttaacacaagcatattactttcaatcatcttctggaactcctttcatactctcaacgttatctgtgcctaattctttatatgttctaaatgctaatactaagaaaaaggctgttgtcgcaaaggcgataacgattgctgttaaaataagtgcttgcgggataggatcaacatagctttttacgttcgcttcataaattggaacagtaccatgtttaagtccgcccatagttattaaaaataagtttgctgcatgtgttaatagtgtagttcccataacaattcgtatcagacttttagacaaaacgagatagacactaattgctgtgagaataccactaacaaaaatcataataatttccactattcgttctctccaatcgaaataataattgtcatgacagtaccaactactgcacataaaacaccgaaatcaaagaatactgctgttgtcatatgaacaggttctaatataaataacggtatatcaaatgtgacatgcgtaaagaaatttttgcctaaaaaccaacttgcgataggcgtcgcaatacaaaaaactaatccgatacctatcaagattttaaaatctaatgggaaaattttacgcattgtttctatatcaaatgcaatcgtaatgataacaagtgaacttgcgaataataatccgccgacgaaaccgccaccaggtgtataatgtcctgctaagaaaagtgaaaaaccaaagaccattaccatgaaaaagataataactgcagcaaattgcaaaattagatcattttgttgtctattcatgatttttcacctcgttaccttgcgtttgacgctttttacgtaatttaatcattgtatatacagctaatcctgcgataccaagcacagatgactcgaatagagtatccataccacggaaatcaacaagtatgacgtttaccatgtttttaccgtgagctaaatcatagacgtgctcttgataaaacttagatatcgattcaaaatgtctatttccgtatgcaattaaaccgataataatgacggacaaaccaacaccaccagcaattaaagcattagtaagctggaatgagcgcttttcattataacgatttaaatttggtaagtggtagaagcataataagaacaatgctgttgaaatagattcaacgacaaactgtgtcaatgctaagtcgggtgctttaaagaatataaacaatacagacacagcatatccaactgcacttaacataatgatgctaaataatcttgatttagcgaaaagaattaaaaaggcagcacttaataataaaattacgatacaaacttcgaaaattctaatcggactaacgtctttaaaattaatgttgaaaggtactgagaatatagtgacaaatgttaataaaattaatgcaccaaaaatgataactaaattattacgtgaataatcggtaacatagctattcgtcatcttttcagagtagtttggaataacatttgcacttctgttgtaccaataattgaatgttagtttaccaggttgtcgttgcaacaatttcacccaataactaaatgtcacaattagtaagatacctaaaatataaatcactaatgttgatataaaggcaggcgttaatccatggaacatatggaattcaacatcatcaattaccgtatgattaatcgaagatgtagctggttcaataatcgaattagttaaaatgccagggaataaaccaaatacaattactaatgtagctaaaatagctggtgataaaagcattaatattgatacttcgtgtgcttttttaggtaattgttcaggtttatattgtccgaaaaatatatgcattataaatttaattgaatatacaaatgtgaagacactgcccactataccaatgattgggaataggtagcctaatgtatcaacactgaataaatttgcttggcttgctgtaaatgttgtttctaaaaatgattcttttgataagaaaccattgaacggtggtacaccagccatacttaatgctgtaataacagtgattgtaaatgaaataggcataattgttagtaagccacctaatttcttaacatcacgtgtaccagtagaatgatccactgcgcctgtaatcataaatagggcacctttaaatgttgcatggttgattaaatggaatattgcagccgtaaatgcagcagcatatattttgctatcatcgccttgatagtgataactaatggcaccgattccaagcatcgccataatcatacctaattgggatactgttgaaaatgccagtatacctttcaagtcttgttgttttgttgcgtttagcgaagcccagaataacgtaattaaaccaacgagtgtgacagtccatacccaaccttgcgatgctgcgaagattggtgtcattcgagcgattaaatataaccctgctttaaccattgttgctgaatgaagataagcactgactggtgtaggtgcttccattgcatctggtagccaaatataaaatggaaactgagcagattttgtaaaagcaccaatcatgattaaaatcatcgcaaaaatgaagaatgggctattttgaatttcagaagcatgttgaatcatgtactgaatgctaaatgattgtgttggtatagcgagtaagatgataccacctaataatgatagaccaccaaatactgtgattatgagcgatttttgagcaccatatatagatgcttgtcgttcgcgccagaatgaaataagtaaaaaactagaaaatgacgttagctcccagaataaatatagaataataacattatctgaaagtacgacacctaacattgcacccataaatagtaataaataacaataaaaattccctagttgttctgacttacttaagtagccgattgaatataatactactaaactgccgattcctgaaataagcaaactaaagagtaaacctaagccatcaagatataaatcaaagttcataccaaaatgaggcatccaatttaaggttttcattacagtattacctgacatcgtcgttttaattaatgtaagcatataaataaatatgacgatagggacaggtaatacgaaccatcctaaatgtatacgtttaaaaaatctatacaggataggaataatgagtgcgaatattaacggtaatatcaccgcaatatgtaacaaactcactatgttgtcctcctttaaaaaatatttatgttattcattatacatgaatgatatagttctgaaaaacgtacacactccttgttgtgctttattttcagaagtatttaaataagaagaaacacgtcattttttatttaaaattttctttgtattgaagtgaataatcttcttttaagcgtgctaaactagctaaagacatttcagcatgttttgtttgctgagctttaagtttagtttctaaatctgtaattgcttgttgaagtgaatcttcatagcgcaatacatcaacattgaagtcgcgtaattgtgaacgtttcgtatagcgtttttcaaaatggcttaatgctttgcgttcatggaaaaatacaccttcagtttcagtagggttatgtaaatcaccttgtttcgggtgtttgataacttgttcaactttaacaaggacatcgtctccattttcttcaacaatcgtgacaccatagctacctgttttgtgtgaaaatcgatatagcttcatgctattttcctcccttaaaagtatgttaatatatatgtatcataacatgaatggagaatataaatggctaactatccacagttaaacaaagaagtacaacaaggtgaaattaaagtggttatgcacacaaataaaggtgacatgacattcaaattatttccaaatattgcaccaaaaacagttgaaaattttgtgacacatgcaaaaaatggttattatgatggaataacattccaccgtgtcattaatgacttcatgattcaaggtggcgatccaacagctactggtatgggtggcgaaagtatttatggcggtgcttttgaagatgaattttcattaaatgcatttaacttatatggcgcattatcaatggctaactcaggacctaatactaatggttcacaatttttcattgttcaaatgaaagaagtacctcaaaatatgttaagtcaacttgcagatggtggctggcctcaaccaatcgttgatgcatatggcgaaaagggtggtacaccatggttagatcaaaaacatacagtattcggtcaaatcattgatggtgaaactactttagaagatattgcaaatacaaaagtgggaccacaagacaaaccacttcatgatgttgtaattgaatctattgatgttgaagaataatagctaaacataattaactaccaacattttaaactcggataaagctaatttatgaatggattagtatatattccaacgaaacaaataaactaacatgatgagcaatctcaatatatttatcaagaaagcacagtttttaaatagatgtgtattctaaagataatagttgaggttgctttttatgtttttaaagagaattgctattcaaatagttaataaattgaaaacaaagtagctggatatcatattgatttagataggagtttgttgctaattttatttgtaaatccaagtttgtagaattcttattcatttataaaataatattcgtatgatttgatgttttaattagtccaccatttcgatttgtgctatgataatagtgttaagtaaacgaaataaggggttattaagttgaataactacaaaattggccaacatatcaaggtgcgtgtaactggtattcaaccatacggtgcgtttgttgagacccctaatcatactgaaggactgattcatatatcagaaattatggatgactacgttcataatttgaagaaatttctatcagaaggccaaattgttaaagctaaaattttgtctatagatgatgaaggaaagcttaatctatcattaaaggataatgattacttcaaaaattatgagcgtaagaaggaaaaacaatcagtattagatgaaatcagagaaacagaaaaatatgggtttcaaacacttaaagaacgcttaccaatctggataaaacagtcaaagcgagcaattcgaaacgactaaaggaacagataaatcgtaccgaaaatcatacaaagggtctgaaatgaaagtttcttagactataaaagagattagtatctattaaattttattagatactaatctctttttgtctacgataacgtaatatgattgattctatttacacgtacaaatggtttaaggtgacatatccattatctttgatagatagaatcattgatttgcaatattgtatgtggatttgtttttttaatttattttagaaatgagaactacaacttaaagtattaaacgaattgcaactatataaacagataattggagaatgaaaaaattacatgttatagtcaactcaataattttaaggaggaattaagtaatgaaaagtaaatacgaaccattgtttgataaagtagaattaccaaatggagtagagttgagaaatcgatttgtgttagcccctttaacacatatttcttcaaatgatgatggtactatttcagatgtagaacttccttatattgaaaagcgttcacaagatgttggtattacaattaatgctgcgagtaatgtgagtgatgtcggaaaagcatttccaggacagccatcaatcgcgcatgacagtgatattgaaggactaaaacgattagctacagcaatgaagaaaaacggtgccaaagcactcgtacaaatacatcatggcggtgcacaagcattgcctgaattaacacctggtggagacgtcgtagcaccaagtccaatttctttaaaaagtttcggtcagaaacaagaacatagtgctagagaaatgacgaatgaagagattgaacaagcaatcaaggattttggtgaagcaacgcgacgtgcaattgaagcaggatttgatggtgttgaaatacatggcgcgaatcattacttaattcatcaatttgtatcaccatactataatagaagaaatgatgtttgggtaaatcaatataaattcccggtcgctgtgattgaagaggtgcttaaagcgaaagaagcgtatggcaataaagactttatagttggatacagattatctccagaggaagcggagtctccaggaatcacaatggaaattacagaggaactcgttaataaaattagccatatgccaatcgactatattcatgtttcgatgatggatacgcatgcaacgacacgtgaaggtaaatacgctggacaagaaagactgcctttaattcacaaatggataaatggtcgtatgccacttatcggtattggttcaattttcacagctgacgaagctttagatgcagttgaaaatgttggtgttgacttagtagccattggtagagagctactactggattatcaatttgttgaaaaaattaaagatggacgggaagatgaaattattaattactttgatccagagagagaagataatcatcacttaactcctaatttatggcatcaatttaatgaaggattctatccattaccacgtaaagataaataagtgtttaactgttaccactaatgatattgtgtatgcaatttgttagtggttttcaatatttataaataaaaatattcttagtaaaatatacttttgattaagtgtaaaattatcaattcttttgcttgtaatcatttaagtaattatgtcattataaatgtaagggttttcaaaatagacaaatttaatgaaacttagtgattatttcatcttttttggtggaaaagtatctgctttgaaaactaatgtaattatttggataatgtttcatgtataatagttataaatgatgaaaaggggagatatgatgactaaatctgaaaaaattattgagttaacaaatcattacggagcacataattatttaccattgccaattgtcatttcagaagctgaaggggtatgggttaaagatcctgaaggcaataaatatatggatatgttatctgcatattccgctgttaaccaaggtcatagacatccgaaaattattcaagcattaaaagatcaagctgataaagtgactctagtttcacgtgcttttcatagtgataacttaggtgaatggtacgaaaaaatttgtaaactggcaggtaaagataaagctttaccaatgaatacaggtgctgaagcagtagaaacagctttgaaagcagcacgacgctgggcatacgatgttaaaggaattgagccaaataaagcagaaatcattgcatttaatggtaacttccatggtcgaacaatggcgccagtttcattatcttcagaagcagaataccaacgtggttatggtccgttattagatggatttagaaaagttgattttggagatgtagatgcattgaaagctgcaattaatgaaaatactgcagcagttttagtagaaccaattcaaggtgaagcgggtataaatataccgccagaaggatatttgaaagcaattagagaattatgtgatgaacataatgtcttatttattgctgacgaaatccaagcaggattaggtcgttcgggtaaattatttgctacggattgggataatgtaaaacctgatgtctatattttaggtaaagcactaggtggtggtgtcttcccaatttctgttgtattagcagataaagaagtattagatgtctttacacctggctcacatggttcaacatttggtggtaatccacttgcttgtgctgcatcaattgctgcattagatgttatcgttgatgaggatttaccaggtcgctctttagaattaggagattattttaaagaacaattaaagcaaattgatcatccatcaattaaagaagtccgtggacgtggtttatttataggtgtggaacttaatgaaagtgctagaccatattgtgaagctttgaaagaagaaggcttattatgtaaagaaacgcatgatactgtcattcgttttgcaccaccattaattattactaaagaagaattggaccttgcacttgaaaaaataagacatgtatttcaataatgtcaaaaagttgtaacaatcagtttgtaagggctttaaaaaggaatacgttatgttacaatatgtttgaaagcgaaatcattaggtaaagaagaggcgaaaaggatcatgactgagaacaataatttagtaacttctactcaaggaattattaaagaagcattgcataaattgggatttgacgaaggaatgtacgatttaattaaagaacctttaagaatgttacaagtgcgtatccctgtacgaatggatgatggcactgttaaaacattcacaggttaccgtgcgcaacataatgatgctgttggaccaacaaaagggggcgtgcgtttccacccagatgttgatgaagaagaagtaaaagcattatcaatgtggatgactttgaaatgtggcattgtaaacttaccatacggtggtggtaagggtggtatcgtttgtgatccacgtcaaatgagcattcatgaagttgaacgtttatcacgcggatatgtaagagcaatttcacaattcgtaggtccgaacaaagatattccagcaccagatgtatttacaaactcacaaattatggcttggatgatggatgaatatagtgcattagataaatttaattcaccaggtttcatcacaggtaaaccaattgtattgggtggttctcatggacgcgacagatcaactgcactaggtgtagttattgcaattgaacaagctgcaaaacgtcgtaatatgcaaattgaaggtgccaaggttgttattcaaggtttcggtaatgccggaagtttcttagctaaattcttatatgatttaggtgcaaaaattgtaggtatctctgatgcttacggtgcattacacgatccaaatggcttagatatagattatttattagaccgtcgtgatagttttggtacggtaacaaatttatttgaagaaacaatctcaaataaagaattgtttgaattagattgtgacattttagtaccagcggctatttcaaaccaaattacagaagacaatgcacatgatattaaagctagtatcgttgttgaagctgctaatggacctacaacaccagaagcaacacgtattttaactgaacgtggtatattattagttccagacgtattagcaagtgctggtggtgtaacggtttcttacttcgaatgggtacaaaataatcaaggttattattggtctgaagaagaagtaaatgaaaagctacgtgaaaaattagaagcggcatttgacacgatttacgaattgtctcaaaatcgaaaaatagatatgagacttgcagcatatatcataggtattaaacgtacagcagaagcagctagatatcgtggttgggcataattaattatcatatgtgatttaacgagcttgggacagaaaacaaagccctaagctcgttaattttattttagcagtagttgactgtaaaacaatgcccgtgtaacacgctcttttcaaaaatagtcggggccccaacacagaggctggtggaaagtcagcttacaatagtgtgcaagttggcggggccccaacacagaggctggcggaaagtcagcttacaatagtgtgcaagttggggtggagccccgacacagagaaattagctcctcaatttctacagacaatgcaagttggcgaggccccaacactgagaatttctaattaaacgctcaactatatatagttgatcaaaaagacagcagtaggataatttcaatttggaaatatcttactgctgttttttatagtaatagctatatttttgtatttatgttttctagtttaacaatactacttaatgacttctttatatttatcagcgaaatttgtaaagacaccatcaacgccatatttatttaatcgtaacatatcagctttttcattcactgtataaggatgtactataaatcctaagtcttttaaatgatgggtattttgttcagttaaatctgtataatcaggacctaatccaatcgcataagagcgtatctcttttaagcgttggtcgttaaattgttgtagttcacctttatcaactaattttactaatggcacatgcttattttgacgatgaattttctttaaactttcgtcagaaaatgattgaatcattacatgtccattttttaatttattgttatttaaaaggtgatgctttttcaatgaagctaataattgttcttccattcctgggtatacatcaggtgactttgtttcaatataatagtttgcattcgggccataacgttctaaaatttcatctaaagtgggtactttagcatttttataacttgctcttgcgtattttggatattttttattaaaccaacttcctgcatctaactgttttaattcatcaagggtataatcctcaactttaccgtgtccatttgttgtacggttaacagtttcatcatgcatagcaactaaatggccatctttggtacgttgtaaatcaatttcgatataagatgcttttaactcattatgactcttatcatatgcttgaaacgtatgctcgggtgcatagccacttgcgccacgatgtgcgatagtagtgaatcgctcattcgttaaatttgtatgccattgaatagcctgaggtttatttgcaatttgatttgtttgttcagcgccagcagtaggtactgataaaaatcccatagtaaaaacagcagaagcagccataaatttagtgaagcttttcgaagagttagtcatagtctttatcctttcatctctttatttgtagtctaacaattttaaaatactacaaaaacctgcttgtgaaaacgctttacacatttcttttacaatttataacatttctgtaatataaatttaaaagaattatcaaacattttaggaatcttaaaaatgtgatgttcaacaagacgaagagagcattaaaatacccacaatgtaattttaatagacattgtgggtaggtagattaacgtatttattgtgatagtaattgtttagcaacatcaagttgttgtttgaccgatgattgacctgttgaaccgtaactttgacgtcgttttaaacaattttcaggctgcaaataatcgtaaatatcggcatcaatactagaatgatgttgttgatatgttgctaaaggaacatctaataaataatgaccttgttgtatacattctaagacaatttttcctacaatttcatgtgcagttctaaatggaatatttttagttactaaataatctgctagttccgttgcatttgaaaaatcttctttaacagtttgattgagtcgttctttattaattgtcatcgtttgaatcataccttcgaaaatacgtaaagaacctttaattgtatggacagcatcgaataaaccttctttatcttcctgcatatctttgttatatgctagaggtaatccttttaaagtcataagcatgctcattaaatgaccagtcgttcgaccaactttacctctaattaattctgccatatcaggatttttcttttgtggcataatagatgagccagttgaaaatgcatctgataatgtaatgaatttagcttcgtctgtggaccagaaaataatttcctctgcaaagcgtgataagtgaaccatcgttaaagaaatattatgcaatgtttcaataatatagtctctgtcactaacagcatctaggctattctcatagagactgccaaagttcaacaatgctgttgtctcgtgtctatcgatagggtatgtggtaccacttaaggctgctgcacctaaaggattaatatcgattcgttttaaactatcttcaaatcgttgttggtctcgttgtaacatccaaaaataagtcataatatgatgtgcaaatgaaattggctgtgcacgctgtaaatgagtataaccaggcataattgtatcaacattattggaagcgatgtctacaattacactttgtaacgacttaattaatgcgatgatatcttgcacttgtttcttagtgtacaagtgcatgtctgttgcaacttgatcgtttctactgcgtccagtatgcaacttaccaccagcatcaccaatacgtttaattaattcatgttcaatatttaaatgaatatcttctaatgatgcactaaattgaatttgatcttgatgataatcatgttgaatagattttagtccttgtataatttgttcgctgtcttgttgactaataatgccttgattcgcaagcatagttgcatgtgcaatgctgccttcgatatcttgatctatgagcgtttgatcaaaagtaatggatgcgttaaagtcgtcaacccactcttcaggttgtacttcaaatctaccgccccaagctttattgctcattgctatagcctccatgtagcatcgcatttacttgagtaggtaaaccatagatatcgataaagccaacagcagcgtcttgattaaatgcatcttcttttgtataagttgctaatttttcatcatataatgtgtaaggtgattttctaccatttacgatggcattacctttgaataatttaattctgacatcaccacttacgtattgctgagtactatcaataaataattttaagctatcagttaaaggtgagaaccaaagtccattgtatagttgttcagcaaattgcttctcgatgattggtttaaagtgtgcgacatctttcgttaacgtaatcgtttctaatgctttatgcgcttttaaaataacttctgcagcaggtgcctcataaatttctcttgatttgatacctacaagtctattttctacatggtcaattcttccgataccatgcttaccagctaatgcattcaacgttaaaattaaatcgtctaattcatatgttttgccatcaatttgaactgggatgcctttatcaaacgttaaaatgatttcatcagcagcatctggtgtttcttctaaagcatttgttagatcgaacgcatcctctggtggcgcagcataaggatcttctaaaataccacattcattcgctctgccccatagattttgatcgatagaataaggtgaatcatggttgattgatacagggatattatgtttaattgcataatcgatttcttcttcacgactccatgcccactcacgtacaggtgcgaatgctttcaatgatgggtttaatgctttaatggcaacttcgaaacgtacttggtcattccctttaccagtacaaccatgtgcaatacctactgaatttgttttctcagcaatctctactaattttttagcgattaatggtcttgataaagctgaaactaatggatatgcattttcatacattaaatttcctttgattgcataacttacatactcatcactaaattcttttgttgcatcaataatatgacattcaactgctcccatatctaaagcttttttataaacgatgtctaaatctttaccttcaccaacatctaggcaacaagctacaacgtcgtatcctttgtcgataagccattgaacggccacacttgtatctagtcctcctgaatatgctaaaacaattttctctttcataaaattcacctcattgtagttatctgaatatttcgtatgaacacatgatagcaaacttttaatgaaaataaaaccattattttacatatttattcataaaatgcgatagagatagttagagttgtaagtataaatgcttatttatcaatgtttaaaagtattttaaaaaacatgcaaattgtataaaaatgtttgagtgtttgacgccagtttgaaatgtttgttgaaaaataggtgtgaaacgtcacataaatatcaattttattgattaagtacaaacttgtgaattgaatcgcaaacgtaaacttagtaaaattaagatattaaatgaaacaggaggcttttatagatgactcatattcaattagattttagtaaaacgttagaatttttcggtgaacacgaattaaaacaacaacaagaaattgttaaatcaattcacaaaacaattcatgaaggtactggtgcaggtagtgacttcttaggctgggttgatttaccagttgattacgacaaagaagaattttcaagaattgttgaagcatcaaaacgcattaaagaaaattctgatgttttagtagtcatcggtattggtggttcttacttaggtgcacgtgcagcaatcgaaatgttaacgtcatcatttagaaacagcaatgaataccctgaaattgtatttgttggtaatcacttatcatcaacatatacgaaagagttagttgattatttagcagacaaagatttctctgtaaacgttatttctaaatctggtacaactacagaaccagcagttgcatttagattgttcaaacaattagttgaagaaagatacggtaaagaagaagcacaaaaacgtatatttgcaacaacggataaagaaaaaggtgctttaaaacagttggctacaaacgaaggttatgaaacgtttatcgtacctgatgatgtaggtggaagatattctgttttaacagcagtaggattattaccaattgcaacagctggaattaacatcgaagctatgatgattggtgctgcaaaagcacgtgaagaattatcttcagataaattagaagacaacattgcataccaatatgcgacaattcgaaacattttatatgcaaaaggttatacaacagaaatgttgattaactatgaaccatctatgcaatactttaatgaatggtggaaacaattatttggtgaatcagaaggtaaagacttcaaaggtatctatccttcaagtgccaactacacaactgatttacattctttaggtcaatatgtacaagaaggccgtcgtttcttattcgaaacagtggtaaaagtaaatcatcctaaatatgatattactattgaaaaagatagtgatgatctagacggattaaattatttggctggtaaaacaatcgacgaagttaacacaaaagcattcgaaggtacattattagcgcatactgatggtggtgttcctaacatggtagtgaacattccacaattagatgaagaaactttcggttatgtcgtatacttcttcgaacttgcttgtgcaatgagtggataccaattaggtgtaaatccatttaaccaacctggtgtagaagcatataaacaaaacatgttcgcattattaggtaaacctggttttgaagacttgaaaaaagaattagaagagcgtttataaaatacattacttcaatgattagtgaagtttgaaaagatagaactagacgttaactatttaaagcatattttcgaggttgtcattacaaatgtaaaaatgtaatgacaacctcgtttttatttatatgcaagaactaggttactagctaatgtgacaagatgttaagagaaaattaaaaataaaataatatctgtcttacaataatattgttatactactagagactgatttattagcatgattacatgttaatgtttctttacttagtaattaactttataatgtaagaataattatcttcaaccaaagaaagggattgatgatttgtcgtttcatcaagtagaagaatggtttgagatatttcgacagtttggttatttacctggatttatattgttatatattagagcgataattccagtatttcctttagcactctatattttaattaacattcaagcttatggacctattttaggtatattgattagttggcttggattaatttctggaacatttacagtctatttgatctgtaaacgattggtgaacactgagaggatgcagcgaattaaacaacgtactgctgttcaacgcttgattagttttattgatcgccaaggattaatcccattgtttattttactttgttttccttttacgccaaatacattaataaattttgtagcgagtctatctcatattagacctaaatattatttcattgttttggcatcatcaaagttagtttcaacaattattttaggttatttaggtaaggaaattactacaattttaacgcatcctttaagagggatattaatgttagttgtgttggttgtattttggattgttggaaaaaagttagaacagcattttatgggatcgaaaaaggagtgacatcgtgaaaaaagttgtaaaatatttgatttcattgatacttgctattatcattgtactgttcgtacaaacttttgtaatagttggtcatgtcattccgaataatgatatgtcaccaagccttaacaaaggggatcgtgttattgtaaataaaattaaagttacatttaatcaattgaataatggtgatatcattacatataggcgtggtaacgagatatatactagtcgaattattgccaaacctggtcaatcaatggcgtttcgtcagggacaattataccgtgatgaccgaccggttgacgcatcttatgccaagaacagaaaaattaaagattttagtttgcgcaattttaaagaattagatggagatattataccgcctaacaattttgttgtgctaaatgatcatgataacaatcaacatgattctagacaatttggtttaattgataaaaaggatattattggtaatataagtttgagatattatcctttttcaaaatggacgattcagttcaaatcttaaaaagaggtgtcaaaattgaaaaaagaattattggaatggattatttcaattgctattgcgctagttatatttgctataataggtaaatttattgttacaccatatacgattaaaggtgaatcaatggatccaactttgaaagatggcgagcgagtagctgtaaacattattggatataaaacaggtggtttggaaaaaggtaatgtagttgtcttccatgcaaacaaaaatgatgactatgttaaacgtgtcatcggtgttcctggcgataaagtagaatataaaaatgatacattatatgtcaatggtaaaaaacaagatgaaccatatttaaactacaatttaaaacataaacaaggtgattacattactgggactttccaagttaaagatttaccgaatgcgaatcctaaatcaaatgtcattccaaaaggtaaatatttagtgcttggagataatcgtgaagtaagtaaagatagccgtgcgtttggcctcattgatgaagaccaaattgttggtaaagtttcatttagattctggccatttagtgaatttaaacataatttcaatcctgaaaatactaaaaattaatatgaaacaaatacaacatcgtttgtcggttttaatactgataaacgatgttttattttgttagtaccacaataaaagctaagttcgaaatgaacttataataaatcaatcacaatcactttgtgttaaaatatgtgtcaaaggaagtgagggtttgtcatgacattacatgcttatttaggtagagcgggaacaggtaagtctacgaaaatgttgaccgaaacaaaacaaaaaatgaaagcagatccgcttggagatccaatcattttaattgctccaacacaaagtacatttcaattagaacaagcctttgtcaatgatccggaattaaatggtagtttaagaacagaagtgttgcattttgaacgattaagtcatcgtattttccaagaagttggtagttatagcgaacaaaagttatctaaagctgcaacggaaatgatgatttataacattgttcaagaacaacaaaagtatttaaaactttatcaatcacaagcaaaatattatgggtttagtgaaaaattaacagaacaaattcaagattttaaaaaatatgcagtaacgcctgaacatttagaacactttattgctgataaaaatatgcaaactcgaactaaaaataagatagaggatattgctttaatataccgtgagttcgaacaacgcattcaaaacgagtttattacgggtgaggattcattacaatattttattgattgtatgccgaaatcagagtggctaaaacgtgctgatatatatattgatggttttcacaacttttcaacgattgagtatttaataatcaaaggattaattaaatatgcgaagagtgtcacaattatattgacgacagatggtaaccacgatcaatttagtttatttagaaaaccatcagaagtgttacgacatattgaagaaatagcaaatgaactcaatatttctattgaacgtcaatatttcaagcaattatatcgcttcaataatcaagatttaaagcatcttgaacaagaatttgatgcacttcaaatcaatcgagtggcatgtcaaggtcatatcaatattttagaatctgcgactatgagagaggaaataaatgaaattgcgcgacgtatcatcgttgatattcgtgataagcaattacgatatcaagatattgcaattttatatcgtgacgagtcttatgcttatttatttgattccatattaccgctttataatattccttataacattgatacaaagcgttcgatgacacatcatccggtcatggaaatgattcgttcattgattgaagttattcaatctaattggcaagtgaatccaatgctacgcttattgaagactgatgtgttaacggcatcatatctaaaaagtgcatacttagttgatttacttgaaaattttgtacttgaacgtggtatatacggtaaacgttggttagatgatgagctatttaatgtcgaacattttagcaaaatggggcgtaaagcgcataaactgaccgaagatgaacgtaacacatttgaacaagtcgttaagttaaagaaagatgtcattgataaaattttacattttgaaaagcaaatgtcacaagcggaaactgtaaaagactttgcaactgctttttatgaaagtatggaatatttcgaactgccaaatcaattgatgacagagcgagatgaacttgatttaaatggtaatcatgaaaaggcggaggaaattgatcaaatatggaatggcttaattcaaatccttgatgacttagttctagtatttggagatgaaacaatgtcgatggaacgtttcttagaagtatttgatattggtttagaacaattagaatttgttatgattccgcaaacattggaccaagtaagtattggtacgatggatttggctaaagtcgataataagcaacatgtttacttagtaggtatgaatgatggtacgatgccacaaccagtaactgcgtcaagcttgattacagatgaagaaaagaaatactttgaacagcaggctaatgtcgagttaagtccaacatcagatattttacagatggatgaagcatttgtttgttatgttgctatgactagagctaagggagatgttacattttcttacagtctaatgggatcaagtggtgatgataaggagatcagcccatttttaaatcaaattcaatcattgttcaaccaattggaaattactaacattcctcaataccatgaagttaacccattgtcactaatgcaacatgctaagcaaaccaaaattacattatttgaagcattgcgtgcttggttatatgatgaaattgtggctgatagttggttagatgcttatcaagtaattagagatagcgatcatttaaatcaaggtttagattatttaatgtcagcattaacgtttgacaatgaaactgtaaaattaggtgaaacgttgtctaaagatttatatggtaaggaaatcaatgccagtgtatcccgttttgaaggttatcaacaatgcccatttaaacactatgcgtcacatggtctgaaactaaatgagcgaacgaagtatgaacttcaaaactttgatttaggtgatattttccattctgttttaaaatatatatctgaacgtattaatggcgattttaaacaattagacctgaaaaaaataagacaattaacgaatgaagcattggaagaaattttacctaaagttcagtttaatttattaaattcttcagcttactatcgttatttatcaagacgcattggcgctattgtagaaacaacactaagcgcattaaaatatcaaggcacgtattcaaagtttatgccaaaacattttgagacaagttttagaaggaaaccaagaacaaatgacgaattaattgcacaaacattaacgacaactcaaggtattccaattaatattagagggcaaattgaccgtatcgatacgtatacaaagaatgatacaagttttgttaatatcattgactataaatcctctgaaggtagtgcgacacttgatttaacgaaagtatattatggtatgcaaatgcaaatgatgacatacatggatatcgttttacaaaataaacaacgtcttggattaacagatattgtgaaaccaggtggattattatacttccatgtacatgaacctagaatcaaatttaaatcatgggctgatattgatgaagataaactagaacaagatttaattaaaaagtttaagctgagtggtttagtgaatgcagaccaaactgttattgatgcattggatattcgtttagaacctaaattcacttcagatattgtaccagttggtttgaataaagatggttctttgagtaaacgaggcagccaagttgcagatgaagcaacgatttataaattcatacaacataacaaagagaattttatagaaacagcttcaaatattatggatggacatactgaagttgcaccattaaagtacaaacaaaaattgccatgtgctttttgtagttatcaatcggtatgtcatgtagatggcatgattgatagtaagcgatatcgaactgtagatgaaacaataaatccaattgaagcaattcaaaatattaacattaatgatgaatttgggggtgagcaatagatgacaattccagagaaaccacaaggcgtgatttggactgacgcgcaatggcaaagtatttacgcaactggacaagatgtacttgttgcagccgcggcaggttcaggtaaaacagctgtactagttgagcgtattatccaaaagattttacgtgatggcattgatgtcgatcgacttttagtcgtaacgtttacaaacttaagcgcacgtgaaatgaagcatcgtgtagaccaacgtattcaagaggcatcgattgctgatcctgcaaatgcacacttgaaaaaccaacgcatcaaaattcatcaagcacaaatatctacactccatagtttttgcttgaaattaattcaacagcattatgatgtattaaatattgacccgaactttagaacaagcagtgaagctgaaaatattttattattagaacaaacgatagatgaggtcatagaacaacattacgatatccttgatcctgcttttattgaattaacagagcaattgtcttcagatagaagtgatgatcagtttcgaatgattattaaacaattgtatttctttagcgttgcaaatccaaatcctacaaattggttggatcaattggtgacaccatacgaagaagaagcacaacaagcgcaacttattcaactactaacagacttatctaaagtatttatcacagctgcctatgatgctttaaataaggcgtatgatttgtttagtatgatggatggcgtcgataaacatttagctgttatagaagatgaacgacgtttaatggggcgtgttttagaaggtggttttattgatataccttatttaactgatcatgaatttggcgcgcgtttgcctaatgtaacagcgaaaattaaagaagcaaatgaaatgatggtcgatgccttagaagatgctaaacttcagtataaaaaatataaatcattaattgataaagtgaagagtgattacttttcaagagaagctgatgatttgaaagctgatatgcaacaattggcgccacgagtaaagtaccttgcgcgtattgtgaaagatgttatgtcagaattcaatcgaaaaaagcgtagcaaaaatattttggatttttctgattatgaacattttgcactacaaattttaactaatgaggatggttcgccatcagaaattgccgaatcataccgtcaacactttcaagaaatattggtcgatgagtatcaagatacgaaccgagttcaagagaaaatactatcttgcatcaaaacgggtgatgaacataatggtaatttatttatggttggagatgttaagcaatccatttataaatttagacaagctgatccaagtttatttattgaaaagtatcaacgctttactatagatggagatggcactggacgtcgaattgatttgtcgcaaaacttccgttctcgaaaagaagtactgtcaacgactaactatatattcaaacatatgatggatgaacaagtcggtgaagtaaaatatgatgaagcggcacagttgtattatggtgcaccatatgatgaatcggaccatccagtaaacttaaaagtgcttgttgaagcggatcaagaacatagtgatttaactggtagtgaacaagaagcgcattttatagtagaacaagttaaagatatcttagaacatcaaaaagtttatgacatgaaaacaggaagctatagaagtgcgacatacaaagatatcgttattctagaacgcagctttggacaagctcacaatttacaacaagcctttaaaaatgaagatattccattccatgttaatagtcgtgaaggttactttgaacaaacagaagtccgcttagtattatcatttttaagagcgatagataatccattacaagatatttatttagttgggttaatgcgctccgttatatatcagttcaaagaagacgaattagctcaaattagaatattgagtccaaatgatgactacttctatcaatcgattgtaaattacattaatgacgaagcagcagatgctattttagttgataaattaaaaatgtttttatcagatattcaaagttaccaacaatatagtaaagatcatccggtgtatcagttaattgataaattttataatgatcattatgttattcaatactttagtggacttattggtggacgtggacgacgtgcaaacctttatggtttatttaataaagctatcgagtttgagaattcaagttttagaggtttatatcaatttattcgttttatcgatgaattgattgaaagaggcaaagattttggtgaggaaaatgtagttggtccaaacgataatgttgttagaatgatgacaattcatagtagtaaaggtctagagtttccatttgtcatttattctggattgtcaaaagattttaataaacgtgatttgaaacaaccagttattttaaatcagcaatttggtctcggaatggattattttgatgtggataaagaaatggcatttccatctttagcttcggttgcatataaagctgttgccgaaaaagaacttgtgtcagaagaaatgcgattagtctatgtagcattaacaagagcgaaagaacaactttatttaattggtagagtgaaaaatgataaatcgttactagaactagagcaattgtctatttctggtgagcacattgctgtcaatgaacgattaacttcaccaaatccgttccatcttatttatagtattttatctaaacatcaatctgcgtcaattccagatgatttaaaatttgaaaaagatatagcacaagttgaagatagtagtcgtccgaatgtaaatatttcaattatatactttgaagatgtgtctacagaaaccattttagataataatgaatatcgttcggttaatcaattagaaactatgcaaaatggtaatgaggatgttaaagcacaaattaaacaccaacttgattatcaatatccatatgtaaatgatactaaaaagccatcaaaacaatctgtttctgaattgaaaaggcaatatgaaacagaagaaagtggcacaagttacgaacgagtaagacaatatcgtatcggtttttcaacgtatgaacgacctaaatttctaagtgaacaaggtaaacgaaaagcgaatgaaattggtacgttaatgcatacagtgatgcaacatttaccattcaaaaaagaacgcatatctgaagttgagttacatcagtatatcgatggattaatcgataaacatattatcgaagcagatgcgaaaaaagatatccgtatggatgaaataatgacatttatcaatagtgagttatattcgattattgctgaagcagagcaagtttatcgtgaattaccgtttgtagttaaccaagcattagttgaccaattgccacaaggagacgaagacgtctcaattattcaaggtatgattgacttaatctttgttaaagatggtgtgcattattttgtagactataaaaccgatgcatttaatcgtcgccgtgggatgacagatgaagaaattggtacacaattaaaaaataaatataagatacagatgaaatattatcaaaatacgcttcaaacgatacttaataaagaagttaaaggttatttatacttcttcaaatttggtacattgcaactgtagtattttgattttcaaaagaataaaaaataatttcgattaagtgcaaagcccttgtagcagaatgaacacaactcattttcaaaattgtcttacttatttatttgttatttgataacgaaaaaagttataatgtgaattaagataaagatgaggagttgagaatgaatgaaattcttatcattcaagtataatgacaaaacttcatatggcgttaaagtaaaacgcgaagatgctgtatgggatttaacacaagtatttgctgactttgcagaaggggatttccatcctaaaacattgttagctggtttacaacaaaatcatactttagattttcaagaacaagtacgtaaagcagttgtagcagcagaagatagcggcaaagctgaagactataaaatttcatttaatgacattgaatttttaccaccagtaacacctccgaataatgtgattgcttttggtagaaattacaaagatcatgcgaacgaattaaatcatgaagtagaaagattatatgtatttacaaaagcagcgtcatctttaacaggagataatgcaacaattccaaatcataaagatattactgatcaattagattatgaaggtgaattaggtattgttattggtaagtctggtgaaaagattccaaaagcattagctttagattatgtttacggctatacaattattaacgatatcactgatcgcaaagcacaaagtgaacaagatcaagcatttttatcaaaaagtttaactggcggttgcccaatgggtccttatatcgttactaaagacgaactaccattacctgaaaatgtaaatattgttacaaaagttaacaatgaaattagacaagatggtaacactggcgaaatgattcttaaaattgatgaattaatagaagaaatttcaaaatatgttgcactacatccgggagatattattgcaactggtacaccagcaggcgttggtgcaggtatgcaaccacctaaatttttacaaccaggtgatgaagttaaagtgactattgataatattggaacgctgacaacttatatcgctaaataattatcatttaaaacatactaagattagctatgaagaaatctatgacgatagattttttcatagctattttttatagttatagagagaagtagactgtccagactcttggattttaaatccgtataaaaaacaagtcagctttactctcgccttttgaaattcgtttgtagtatgttgggttcttgaaaccgtgtataggaaaatgaaatgagaaaggttgagtaaagtttttagcttctcaattattcaaaggaggtttttttatcgattacttaggtgttgatattagtaaaagaagtagtgtagttgcacattataaaaatggaaaattccaaaaagagtttttcatccaaaataataaaaatggttacaattatttactcaagtatttgaatgacttacaccacccacaactcatttttgaatctacaggtatctattcaagaggtatgcaacgattttgttgtgtaaatcaaattaactatattcaaatgaatccgttagaagccaaatttaaaacgagcactctaagatcatggaaaactgatcaggcagatgctcataagcttgcttgtttaggaccgacgcttaaacaaacaggcaacttacctatacatgagttaatattctttgaattaagagaacgcgtccgttttcatctagaaatcgagaatgaacaaaatcgacttaaatttcagatccttgaattactccatcaaacattccctggtttagaaagattatttagtagtcgatattcaatcattgcactcaacatcgcagaaatctttactcatccagacatggttcttgatatcgacaaggatgtactgattacacatatattcaattctacagataagggaatgtcaatggataaagctacaaaatatgcacttcaattaagagtgattgctcaagaaagctatcctaatgtcgatagacattcctttctagtcgaaaaattacgcttacttattcaacaattaaaacaatctattcatcatctcaaacaattagatgatgccatgattcaattagcacaacaactcgattattttgaaaatattcattcgatacctggtattggtaagctaagcacagctatgattattggggagattggtgatattaagcgatttaaatcaaataaacaactcaatgcttttgttggcattgatatcaaacgatatcaatcaggtcatacacactgtagagataccatcaacaagcgtggtaataaaaaagcgagaaaacttttattttgggtgattatgaatataataagagggcagcatcattatgacaatcatgtcgtcgattattactacaaactaagaaagcagcctaatgagaaacctcataagactgccatcattgcttgtataaatcgattattaaaaacaattcattatcttgtaatgaatcataaattgtacgattatcaaatgtcaccacattagccaaacgtacaatcaaatgtagtttaacaccttattcaaaaaaattaaaatgaacggtttagttaagtaatgcttattttaattataagtacttgactaatcgtaggaaaagcgaggctgggacataaatccctaaaaaacagcagtaagataattttcaattagaaaatatcttactgctgttctctatttatacaatacttcgtattgaatggcttcgctttcctagggtgccgtctcagcctcggtcttcgactggcactgctccctcaggagtctcgccattaatactacgtattaacatgtaattttactttgaaatactttaatgcccaaattaatcaaaagctttttgaaccagaaacgaaaaaaatcaatagtcaaagaaaaattgatgtagagcctgtttttggatttgtgaaggctattttgggtttcactagaatgtcagttcgaggaataaataaagttaaacgagagctaggttttgtattaatggtacttaatataaggaaaatagcagctcaacgagctgtacattataaaatacatatcaaaaaagctgatttctatcaaataattaatagaaaacagcttttttaaattgcctaagaacttaatgtcccagcctggttttttcttgcttttctaaaaaggtgttaaagataattgtttataatgttaccattttgagatgaaagtgaaatattgatattaagaattagttgattattttacagcagatgcacaatattctaataaggaataaaatgtcatgttcttcctctcaaatatagaagtgtggtagaatatatattcgtgtataatcaaatcatgattaaattacaagcaagtgggtattaatcccaagaagctttaatttaataatataaattattaaagtggggggaatcagtatgttacatttacatatattaagttgggtattagcgattattttatttatcgctacatacttaaacatttcaaaaaatcaaggcggatcaccatttttcaaaccgttgcacatgattttacgcttatttatgctgttgacgttaatttcaggattttggatattaattcagtcatttatgaatggcggggcaaatcatatgttgcttacattgaaaatgctgtgtggtgttgcagtagttggattgatggaagtgtcgattgctaaaagaaagagacatgaacaaagtcacacaatgttttggataacaattgcattaattatcatcacaatgatattaggtgtcattctaccgttagggcctttatcaaaattattcggtattggctaattgataagacatatagtaaatgacataaggcatggacaattattagtccaagaccttatgtcttttttgattctaaaaatgtttaaacataaaaaaaggactgggacattaagttcttaggcaatgtaaaaaagctgatttctattaattatttgatagaaatcagctttttttaaatgtatttgataatgtacagctcgttgagctgctattttccttatattaagtgccattaatacaaaacctagctctcgtttaactttatttattcctcgaactgacattcgagtgaaacccaaaatagccttcataaatccaaaaacaggctctacatcaatttttctttgactatagatttttttcgtttttggttcagaaagcttttgattaatttgggctttaaagtattcccaattataattcttcatgattttcttattggatttcgaatttggctttatgcattgttgcctcaaagaacatgctgaacagtcatcgcattcatatagtttgaagtcacgtttaaaaccatatctatcattacggtatgcatatcttttaaaacctattcttttgttattaggacatataaattcatcattaagttcgtcatatttccaattttgagtgttgaaaatgtcacttttaaactttctagttttatctttaataaacatgccatacgtaataagtggcgttttattaaaatcatctataatagccatatagttttgctcactaccataacctgcatcagctacaatatactctggtaaattttgaatcattgttaaaaatggaattaaagttctagtatctgttgggttttgaaataggtcataggataaaacaaattgagaatttgtcgctatttgtaaattgtatcctggcttaagttgggtcacgttataatttttatacataaggcacctcgttaatttagtttagtggtatttattaaattatacgacgggacccaccacagaaaattcattttattgaattttacatttatgtgcaagttgggcaaagtgtcttattttttaagtatttcaaagtaaaattacatgttaatacgtagtattaatggcgagactcctgagggagcagtgccagtcgaagaccgaggctgagacggcaccctaggaaagcgaagccattcaatacgaagtattgtataaatagagaacagcagtaagatattttctaattgaaaatatcttactgctgtttattagggatttatgtcccagccttaacataattctaacctagacaattaagattagattgaatcgcatgattcatttatttagctttgtaaccaatcatattgattaaatctttagggtggctatatggtggtgcataagccacttcaaactcagttaactcatctacagttagctggttcatcattgccatcgatagtacatcaatacgtttatctgcaccttcttttcctactgcagctgctcttaaaatctgacggtttgaagtgtcataatacacccttaagtgtaaaggggaatttcctgggtaataattcgcgtgtgcaccttgagtgacttccaccattttatagtcaaattgctttagttcatttggtttaacgccgacactcgcaaatgtataatcaaagaacttcactatattgttgcctaagaagcctttgaattcaatagtgtcatttccagcaatttgttcggcaacaatacttgctgcacggtgagcgccccaagctaaaggaacactagccggtagatcgacatgtcgataatgtgatgttgcaatatcgcctattgcataaatgtttggaacatttgtttcaaatttatcgtttaccggtatgaaaccttttcgatcaagtttgatatttgaactttcgataaattttgaattggggtgagtaccgacaccttcaataatcatatcgtaatgttcaacttttcctgatttaaatgtaatttcatttccattgatagcatcaatttcctcatttaaacggtatggaatctcccgcttatctaattcatcaagtataggttgattcatgtcagcatccattaatttatttatcttatcagatcgatgaattaaagtagggtgtaaaccacgttcataaaggttttcaagaacttctaatgaaacataccctgcacctacaactaatactttatcaacttgatttgctttgatgaattgatcgatagcatcagtgtcttctaaatttctaagtgtaaatgtaatatcactttcaaagccaaggctatttgcacttgcaccagggcttaaaatgagtttatcgtaagattcttcaaattgttcgttggtctttctatttaatacagttacagtttgtctttcatcattgattgcaataacttcatgataagtttttactgtaatttgctttctatcataaaatttttcaggtgtatacgctaaagcatattttctatcttcaacaacttcgccaatgacataaggcaatgcacaattagcaaagctcatatcacgatctttttcaaaaataataatgtcactttctttatctaaacgtcgaatttggctggcacatgttgcaccgccagcgactgctccgactacgactattttgggcatcgtaacttacctcctattgttttaaaatattataaaatgattagttataaattaacagtaatatctaatatttaaattaaagaaatcattcaaatatcgaccaatgccatcttcattattgttgaatgtaatattgttcgctacatctttaagttcttgcaaaccattttccatagcaacaccatggcgggcgtactcaatcatttcaatatcattatcttcatcaccgaatgcaataatattatttcggtcaatatttaaaaattgtctaacttgctcaatgcctcttgctttattaataccaagttttacaatttcaatgacagggaatggtgcgccccagcgtcgatgctcaatatgatcggcataaaaatgagtaagcatatttttgatttcaggtattttactttcttcggcttcaattaaaattgaggtaggggattctttcaagtggacaagtaaattaccagtttgaattcttggattacccattgaaaaaccttcaaataatcttggatcatgattgttaatgaaaacataatctttcacttctgctataatattcgatacttgatattgttgtaatccttgaataatgttttgtgcgatgcctaaatctaaaatttcatggcaagttttgaagtttttatctttagggtgatgtacgtaagcgccattaaaattaacaattggtgtcgttaaatttaattcatgataatacatttgacttgcacgataaggtctgccagtcgcaatcataatttggtgtccacgttgttgtaattcatttaatacttgtttagtatatgatgaaatttctttgttatcgtttaataatgttccgtctaagtctagacatattaaatgtggttgcatatctctctcctcataagttgcttagttcatatagatacatcatagcattttattggcgttttgtcggatatttgatatattatgaataatatgacattaaagaggtgatatggatggaagaggcattgaaagatagtatcttaggtgcattagaaatggtaattgaccctgaattaggaattgatatcgttaatttaggtttagtatacaaagtgaatgttgatgatgaaggcgtatgtacagttgatatgactttaacatcaatgggatgtccaatgggacctcaaattattgatcaagttaaaacagtattagcagagattcctgaaattcaggatactgaagtgaatatcgtatggagtccaccttggacaaaagatatgatgtcacgttacgctaagattgcacttggtgtgagctaacaaaaaattgcattgcctgtagaaattggaatttaattggggctccgcttccaactcgcattgcctgtagaatttcttttcgaaattctctgtgtttgggcccgcagtcaatataacattgtagagtataattcattgtgaataagctcccttcaaagtagacattgaaaaatgaaaattttgaagggagccttatttatgttctaggttctgattttattttgaaaatttatatctaacttgtttcaaaaaatatgaattaagacagtgacttgcacttctaagagtgcacaattcattttctagttgaatattttcttgaaaatttttataataaattgaatttatattacatttatattacaatacataatacttcatagtttttaagttgccgagttgcattacaaattggatttcgaagtaagaatcatcattggtaattttttttatttaacagtattttagtcaatatgattttgatgatgtcgtaattcaataatatacatatgcatttcaatattcttttaaacagcataactaaatttaattaagcatctaagaagaacagttttaaaagggaagaatgcaaaaatgaacaaaacaaagggttttacaaagtataagaaaatgagatatatgccagggctcgatggtttgagggcaatcgctgttctaggaattattatttaccacttaaataagcaatggttgacaggtggctttttaggtgtggatacattttttgtgatctctggttatttaattacaagcttattactcaaagagtatgatgacacaggtatcattaaattgaaaagcttttggatacgtcgtttaaaacgtttattaccagcagtcatagttttattaatggttgtagggacagcaaccttattattaaaatcagataatatcattagggttaaacatgatattattgctgcgatattttatgtatcaaactggtggtatatagcaaaagatgttaattattttgagcaattttcatttatgccattaaagcatttatggtctttagcaattgaagaacagttttacatatttttcccagttattttggttacattattgttaacaattaaaaagcgatacaaaataggatttattttttggggagtatcaataatttctttagggttaatgatgtttatctacagtattaatggggatcattcacgagtgtattttggtacagatactagattacagacattgttactgggtgttattttagcttttttatggccaccgtttaaattgaaaaaagatccacctaaagttgtaaaatatgttattgatagcataggtagtttatcatttatagtacttatattattatttttcattattaatgatgagacgaattggatatatgatggtggtttctatttaatatccatattaatgttatttattattgccagtgtcgttcatccatctacatggatagcgaagatattttcaaatccagtgttagtatttatcgggaaaaggtcttatagtttatatttatggcattttgcagtaattagtttcgtacatagttactatgtagacggacagatacctgtatatgtgtactttatagatataagtttaacaattatatttgcagagctatcatatcgctttatagaaactccatttagaaaagaaggtattaaagctttaaattggcgaccttcttatataccacaatttataagaatggcaattgtagtaaccttgttaataccatttatgttgattttagtaggtgcattcaataaatatggtaaagacattattggagaaaaagcgaatagctttgataccactattgaagataattatttaatgcggatagcaccaattgataacattcacattgatggcttagtaagtgagaagaaaaaggaatcttccgacgtatataataatattaaacctcttttaatcggtgattcagtaatggttgatatcggtgagtcatttaagtcatcagttcctaagtctagaattgatggaaaagtagggcgtcaattgtatcaaaccttacctttagttaaagcgaattattcacaatataaaaaatcatctgatcaagtcgtattagaattaggtacaaatggcgactttactgtcaaacagctcgacgatttacttaatcaatttggaaaagccaagatttatttagttaatacacgtgttccaagaatttatgaggcaaatgtaaatcgattattagctgacgcggcgaaacgaaagtccaatgtcacattaattgattggtataagcgatcacaaggacatagtgaatattttgcaccagacggtgtacatttagagtacaaaggagtcctagctttaaaagatgaaatattaaaagcacttaaaaagaaataacatatgtttaataagtctagttaatgtgtaacgtaacattagctagatttttttaattcaaaaaaatatttacaaatattaggaaatttaagtgtaaaagagttgataaatgattatattgggactataatataattaaggtcaaagaaagtcaaagtcaaaagtgcaacttgaccaactctacaaattagaggtgaaattatatggatataaataaaatgacatatgctgttcaaagtgctttacaacaagcagttgaactgagtcagcaacataaattacaaaatatagaaattgaggcaattttaagcgctgccttaaatgaaagtgaaagcttatataaaagtattttagaacgagcgaatattgaggtagatcaattaaacaaagcttatgaagacaaactaaacacgtatgcatctgtagaaggtgacaatatacaatatggtcaatatattagccaacaagcaaaccaattgataactaaggctgaatcatacatgaaagaatatgaagatgaatatatttcaatggagcatattttacgttcggcaatggacattgatcaaacaacaaaacattatataaataataaagtagaagttatcaaagaaattattaaaaaagtaagagggggaaatcacgtgacatcacaaaatccagaagttaattacgaagcattagctaaatatggccgcgacttagtagaagaagttagacaaggtaaaatggatcctgttataggaagagatgaagaaattcgaaatacgattcgtattttaagtcgtaaaactaaaaacaaccctgtgctcattggtgaaccaggtgttggtaaaactgcaattgttgaaggattagcgcaacgtatagttaaaaaagatgtgccagaatcattattagataaaactgtttttgagttagatttaagcgcattagtagcgggcgctaaatatcgtggtgaatttgaagagagattaaaagcagtcctaaaagaagttaaagagtctgatggtagaattatattatttattgatgaaatccatatgcttgtaggtgctggtaaaacagatggtgccatggatgcaggcaacatgctaaaaccaatgttagcacgaggagagttacattgtattggtgcaacaactttaaatgaatatcgagaatatattgaaaaagattcggcattagagcgtcgtttccaaaaagtagcagttagtgagcctgatgttgaagatacaatttcaattttacgtggtttaaaagaacgatatgaagtgtatcatggtgtgcgtattcaagatagagccttagttgctgccgctgaattgtctgatcgttacatcactgatcgttttttaccagataaagcgattgatttagttgaccaagcatgtgcaacaattcgtacggaaatgggatcaaatccaactgaattggatcaagttaatagacgtgtcatgcaattagaaattgaagaaagcgcacttaaaaatgaatctgacaatgcgagcaaacagagattacaagaactacaagaagagcttgccaatgaaaaagagaaacaagcagcacttcaatctcgtgtagaatcagaaaaagaaaaaatagcaaatttacaagaaaaacgtgcgcaactagatgaaagtagacaagcgttggaagatgcacaaacaaataacaatttagaaaaagctgctgaactacaatatggaacaattcctcaattggaaaaagaacttagagaattagaggataatttccaagatgagcaaggtgaagatacagatcgaatgattcgtgaagttgtaacagacgaagaaattggcgatattgtcagccaatggacaggcataccagtttcaaaattagttgaaacagaacgtgaaaaattacttcacttaagtgacatcttgcataaacgtgttgtaggtcaagataaagcggttgacctggtttcagatgcagtagttagagcaagagcaggtattaaagatccaaacagacctattggtagtttcttattcctaggtccaactggagtaggtaaaactgaattagctaaatcattagctgcatcattatttgattctgaaaaacatatgattcgtattgatatgagtgaatatatggaaaaacatgcagtatcaagattgataggggcacctccaggatatattggacatgatgaagggggtcaattaactgaagcggttcgtcgtaatccatactcagttattttattagatgaggttgaaaaagcgcatactgacgtctttaatgtattattgcaaattttagatgaaggccgtttaactgattctaaaggacgtagcgttgattttaaaaatactattattattatgacaagtaatattggatctcaagttttattagaaaacgtaaaagagactggtgaaattacagaatcaacagaaaaagctgttatgacaagtttaaatgcatatttcaaaccagaaattttgaatcgtatggatgatatcgtattatttaaaccattatctattgatgacatgagtatgattgtagataaaatcttaacgcaattaaatataagattattagaacaacgaatctcaattgaagtttctgatgatgctaaagcttggctaggtcaagaagcttatgaacctcaatacggtgcaagaccattaaaacgttttgtacaacgccaaattgaaacaccattagcacgtatgatgattaaagagggattcccagaaggtacaacgattaaagttaatttaaattcagacaataacttaacgtttaatgttgaaaaaattcatgaataaaattgaaccaagaatgtgatgattaatcgcattcttggttttttagatttgaaatttattataattgttcattggcaatatactttttaaatgatctaataaacgccaatatttctggactttcttttttgctgtatatatatgtaaatgaaataggtgcttgtaaaattttcgtgttaataaccgaaatattgtaatcactatctgttgttatataaataggtaggaatgatataccttgattcatttcgattaatttaattgaagtatgcacatcattgatagatagaaattgtgctttttcataaatatttaaaatattatttttaagtgatgaccaatattctggatggttatcacttattattttgtatttttcaaataaagatgcctcagttagaagatgattattctctttattgggagcaatcaatacaattttaccttcgcatactttttcagaatgaacttctcttagtttaggttgatttctgctaattccgatgtcatacgtatgattattaatatctttttcaatattttcatttttgacatgaagagaaacatcgataaaaggatgctcgttaaagaaagattttaaaaatttgggcataatgaatgtcgcgatatatgaagacacgacaacatttaatttcgattgaaacatcgtttttttaagttggatatgtttgatgccactttcatattgttcaataaaactttgcgcaattggaagaaatgtatgaccatcttcagtcaaaataatttgatttttataagtttcaaatagtttcacattgagatgctgttctaaatttttaatttgcttatgtatagaaggtatagtgagattaatttcttcactagctaatcgatagtttaacgtcttcgctaaaatgacaaatgtatagtaccaatccaaattcatgaacttacctctttcaaaaaagttaataattcattagataatatttaatttttattgcataaaaataatattaatattatatcagaggttaccgagggggtgaagtaatatgattcgaattcaagataatacaataagggatggtatgcaacaaagtaatgttcgaaaaagtctaattataaaaaaagaagtattgaaacaaattaacaagttaaatataaattctgttgaagtaggcatgtgtacaactatcgaggatgaatttaatattcatcaattcagagacattttaagtcctgaaaaagaattagtagtattgactaggcttaatgaaaaagaaataaaaaaaatagtcaaattaaaaattcataatttagtggtaaaaatactattgccaatatctgacttgcatataaaagaaaagcttaatttttcaaataaatattatattcagaaaatcaaagactgcttggatatattaaagaaagataaaaaaggagtagatatttgttttgaagatgcaacaaggacttctagagaaaaattgaaggaatacatggaaattatttcaaaatatcaagttagaacagttacctttgcggacactgtaggatgttcgacaccattagaatacggagatatttttaattactttgtaaaaaatattctaacataattttttctgctcattgtcataacgatctagggttggctactgcaaatacattagctgcaattttaaatggtgcgaaacaaatagaaactacatttttgggaattggtgagagagcggctaatgctcctattgaggaaataattactattttgacaaaaaaacaaataaaaagtacggaattcactttacccgacgtatataaaactagtattaatatttctaaaattctcgattttcaaatatcagaaaacaaacctataattggtgaaaatatatttaaacatgaatcaggaattcatcaagatggtactaaaaaaatataaatatgtatcaatatttagttcctagtgatttaggattgaaaaattcacaagttgttcagtttccaataagtaatatttctagtaagaaaatcttgcacaataaatttaaatcaatagttaacactgaagaaattgatgaaaatatttctttctataaacttgtgaacaagttttcacctgaagtagcacctgaagatacagtggatttacttcagataataaaaaggaggagtaaagatggaaattttaaatgattctgtaaaaagttttgaaaaactttatttacaattacaagatggttttccagtgattgttcctactgatactaattataatttatgtagtttaccaaacaatgatctttgtatcgataaaatatttgaatataaaaagagatcgaaagataagccattatcattatttattgataagccagaggattggaaattgtatggagataatcaaaatacggaaatagttgataaactagttgaaatattttggcctggaccattaaatattattttaaaaaataaaacaagctataattatatgctcaataattcagatagtatagctataggatgtgtgcaaaataaaacgatgagaaggtttatttcatatattaattcacctatagcaattacttcagcaaatatctctggaactgccgatgatattttaataactgaaaatgaagcaattaagcacatgggcgaaaatgtaagatatatgctaagaagtcaaaataaaactaactataaaacatctagtacgattattaaagtgacagataataaaattgaattattaagagaaggagatataaagtttgaagaaataaaagaaagactaggtacaggtattatttatgaataagttaatacttgggatttatttataccgaattttttcacgagcatacttttatttaccgtttttattaatttactttttgattcaaggttattccataatacaattagaaatattaatggcgtcttatggcattgcagcatttttattctctctatacaaagagaagtgttttaaaatttgtaacttaaaagattctaataaattagttgttagtgaaatattcaaaatcatcggtttattgttgttattatatcaaaatcaatatttaattttagtagtggcacaaatattattagggttaagttactcaatgatggcgggtgttgataccgcaataattaaaagaaatataacaaatgagaaatacgtacaaaataagtcaaatagctatatgttcctatcattattaatttcagggattataggtagttatctttatggaataaatattaaatggcctataataatgactggtatattttcaattctaacaattataattattcgatgcacattagttgaaaatagggaattaaatttaataggagaaacaaagggaaagataaagaaatttctaccagaagagaagttttggatattgcattattcttttttaagagcgttaatattaggattttttataggatttattccaattaatatatataatgatttaaaactgaataatttacaatttatttcagtattaacttgttacacagttatgggttttgtatcttcacgttatttaactaaatacttgaattataagtttgtgtcagaaatttgtttagtaatatttttaataatatatacatatcaaagtttcatagcagttactatttctatgatatttttaggtatttcttcagggttaactcgtccacaaactataaataaactttctagcagtagtaacttaagagtgatgcttaattatgcagaaacgttatattttatttttaatatcgcatttttacttatgggtggttacttatatacaataggaactattcaatacttaatattatttatttcgttattaatttttatatatttaataataatattttattttacaaggagagagcaacatgaaaataaaaactgaatttaaagggaacaatataccatatgaatacgcagcaggtgcagatgtgagtgattctattaacgggaatccaattaagtcatttccatttgaagtaattgaattaccggaagggactaaatatcttgcttggtctttaattgactatgatgcaattcctgtgtgtggctttgcatggattcattggagtgttgctaatgtaagtgttagtggcaattcaatttctataaaagcagatttatcaagaacaaagggtgactatgtacaaggtaaaaatagctttactagtgggttattggctgaagatttttcagaaatagaaaatcactatgtaggacctacaccacctgatcaagatcatcaatatgaattaacagtttatgcgttagatcattctttaaatttgaagaatgggttctacttgaatgaatttttaaaagaagtaaatcaacataaaattgatcaaacaagtattaaccttataggaagaaaaatttaatgctaaatatctcatcaatataaaattgttcaattaaaagtacaaagaaacaagagatttaatttatatattaggtacggcgttcgctataatgcaaagaagtaattaaatttaagaaatgtaaacttagttattgtaatgtgaatttatttgaaaaaatagaaagtattaacaattatagcttttacattaattaaaatttatttttaaaaacaagtaaacaatttacatacttataatttttgaaacttttagatttgtgttatattgattttgtaagatactttaactcacaaaggagagagattatatgaaattaaaatcatttataactgtaactttggcactgggcatgatcgcaacgactggcgctactgtgacaagtaatgaggtatctgcagcagaaaaggacaaactaccggcaactcaaaaagctaaagaaatgcaaaatgttccatatacaattgcagtagatggcattatggctttcaatcaatcttacttaaatttaccaaaagatagccaattatcatatttagatttaggaaataaagttaaagctttattatatgatgaacgtggtgtaacacctgagaagattcgaaatgcaaaatctgccgtttacacgattacttggaaagatggtagtaaaaaagaagtggatcttaagaaagatagctacacagcaaacttgtttgattcaaattcaattaaacaaattgatattaatgtaaaaactaaataaacacttaaaattatcaaattcaacatgaagcatttaattttacagtgatgattataatataattgccttgatacaaagattactcgtaaatgacatctttgtattaaggctttttctaaatttaaaagtgatgggttagaggttattgagctttaaaatattcaaaatacaaaacattaatggccaaaaataaaagccgcctttatctgggcagcttcaataataagaaagacatatttcattttatactaaatagttattgtgatgaatctttcggcggtttaattactgcagcaaaaattgctgtgaaaatcgtgaacaatactgccatgataattggattcactacatttaagctgtctccacctactaggctattaagtacaaagttaaccatttgcattaataataatgcccaaaagaatgttacgaggtgtttcatgtcattctacctccactttaattatatatattttattttaagtgaaagttagaaatttgtatagtaacatctcatatattttgaccatattatacagtttaaataaatgattttatctgaatggctattcaaatttaagcgcattaaaaccaatttcatactgaaatttgacgataataaagcattaaaattttattaactagtcaatattcctacctctgacttgagtttaaaaagtaatctatgttaaattaatacctggtattaaaaattttattaagaaggtgttcaactatgaacgtgggtattaaaggttttggtgcatatgcaccagaaaagattattgacaatgcctattttgagcaatttttagatacatctgatgaatggatttctaagatgactggaattaaagaaagacattgggcagatgacgatcaagatacttcagatttagcatatgaagcaagtgtaaaagcaatcgctgacgctggtattcagcctgaagatatagatatgataattgttgccacagcaactggagatatgccatttccaactgtcgcaaatatgttgcaagaacgtttagggacgggcaaagttgcctctatggatcaacttgcagcatgttctggatttatgtattcaatgattacagctaaacaatatgttcaatctggagattatcataatattttagttgtcggtgcagataaattatctaaaataacagatttaactgaccgttctactgcagttctatttggagatggtgcaggtgcggttatcatcggtgaagtttcagaaggcagaggtattataagttatgaaatgggttctgatggcactggtggtaaacatttatatttagataaagatactggtaaactgaaaatgaatggtcgagaagtatttaaatttgctgttagaattatgggtgatgcatcaacacgtgtagttgaaaaagcgaatttaacatcagatgatatagatttatttattcctcatcaagctaatattagaattatggaatcagctagagaacgcttaggtatttcaaaagacaaaatgagtgtttctgtaaataaatatggaaatacttcagctgcgtcaatacctttaagtatcgatcaagaattaaaaaatggtaaactcaaagatgatgatacaattgttcttgtcggattcggtggcggcctaacttggggcgcaatgacaataaaatggggaaaataggaggataacgaatgagtcaaaataaaagagtagttattacaggtatgggagccctttctccaatcggtaatgatgtcaaaacaacatgggagaatgctctaaaaggcgtaaatggtatcgataaaattacacgtatcgatactgaaccttatagcgttcacttagcaggagaacttaaaaactttaatattgaagatcatatcgacaaaaaagaagcgcgtcgtatggatagatttactcaatatgcaattgtagcagctagagaggctgttaaagatgcgcaattagatatcaatgataatactgcagatcgaatcggtgtatggattggttctggtatcggtggtatggaaacatttgaaattgcacataaacaattaatggataaaggcccaagacgtgtgagtccatttttcgtaccaatgttaattcctgatatggcaactgggcaagtatcaattgacttaggtgcaaaaggaccaaatggtgcaacagttacagcatgtgcaacaggtacaaactcaatcggagaagcatttaaaattgtgcaacgcggtgatgcagatgcaatgattactggtggtacggaagctccaatcactcatatggcaattgcaggtttcagtgcaagtcgagcgctttctacaaatgatgacattgaaacagcatgtcgtccattccaagaaggtagagacggttttgttatgggtgaaggtgctggtattttagtaatcgaatctttagaatcagcacaagctcgaggtgccaatatttatgctgagatagttggctatggtactacaggtgatgcttatcatattacagcgccagctccagaaggtgaaggcggttctagagcaatgcaagcagctatggatgatgctggtattgaacctaaagatgtacaatacttaaatgcccatggtacaagtactcctgttggtgacttaaatgaagttaaagctattaaaaatacatttggtgaagcagctaaacacttaaaagttagctcaacaaaatcaatgactggtcacttacttggtgcaacaggtggaattgaagcaatcttctcagcgctttcaattaaagactctaaagtcgcaccgacaatacatgcggtaacaccagacccagaatgtgatttggatattgttccaaatgaagcgcaagaccttgatattacttatgcaatgagtaatagcttaggattcggtggacataacgcagtattagtattcaagaaatttgaagcataattataaaaatcttcagtaacgttgttttagttactgaagattttttctgtttctttatactaagatgagcgacagcacaatcgtcataataaaatatagaatatttattaataataaggggattatccatgtagaaacaaagtaatgctctttttttacctcttgtgggttgaaaaatggatcatcagagatagacttcttctttttcgaagatgacatttgatactttaatcttctaaaaccataacttgtcgcatcaaaaatgccttcttgtacaagtaaaatcaaaaatatgctaataaaaataattaatgaaacataaaacaatatatttaaatatgtaatgatagtatggctattaaaaacccatataataaacgttaatattggcgttattagtgccattccaagccattttttcaacatttgatcactcccacttatagaaaactcttacgcatagtttacattaaaatgagacattgaggaatgattttttaatttctgcagctttattgaaattctaaaatcaatcattcttcattagtttaaagcaaaaaaatattgatatatagtaaatattgtatatataatattagttaagatttcagaaaattttgaagggaatggaaatttagaaatcggaatttgttagaggaggggattagatggagaaatatattttcaaacgatttatttatatgcttatttctttatttattattattacaattacatttttcttaatgaaattaatgccaggttcgccatttaacgatgctaaattaaatgctgaacaaaaagaaattttaaatgaaaaatatggattaaatgatcctgtagctacgcagtatttacattatttaaaaaatgttgttacaggcgattttggtaattcattccagtatcataatcaacctgtgtgggatttgattaaaccgagactactaccttcttttgaaatgggtcttacagcaatgttcatcggtgtgatactgggacttattttaggtgttgcagcagctactaaacaaaattcttgggttgactatacaactacagttatttcagttattgctgtatctgtaccatcttttgtacttgctgtacttttacaatatgtatttgcagttaaattaagatggttcccagtagctggatgggaaggtttttcgaccgcggtattaccgtcacttgcattatctgcagctgttttagcaactgtcgccagatacataagagcagagatgatagaggtattaagttcagactatattttattagcgagagctaaaggtaattcgacaatgcgtgtactttttggacatgcacttagaaatgctttaattccaattattacaattatcgttcccatgttagcaagtattttaacaggcactttaacaattgaaaatatttttggggttcctggattaggggatcaattcgtacgttcaattacaacaaatgatttctcagtaatcatggcaatcacactattatttagcacactgtttatcgtttctatttttattgtagatattttgtacggtgtgatagatccacgaattcgtgttcaaggaggtaaaaaataatggctgaaaataaaaacaatttgtcgattaacgacgatcattctaatgcagctatgacgcatacctctgacgctatcgcatcatctgattttattattagagaattagacttgaatcaggaacctgaaatgcaacgagaaagcaaaaacttttggcaagatgcttgggctcagttaaaacgaaataagttagctgttgtcggtatgataggtttaattatcattgtaatatttgcttttatcggtccagttataaataaacatgattatgctgaacaaaatgtagaacatagaaatcttccggcaaaaatacctgtattagacaaagttccatttttaccttttgatggtaaagatgcagatggcaaggatgcttataaagcagcaaatgctaaagaaaattattggtttggtactgatcagttgggtcgagatttatggacaagaacatggaaaggtgctcaaatttcattgtttatcggtgttgttgcagcgatgttagatatttttattggcgttgtatatggtgcgatttctggattcttcggtggacgtgtcgatacgattatgcaacgtatacttgaagtcatagcatctattccgaatttaattgtcgttattttatttgtattaatttttgaaccatccatttggacaattatattggctatgtctatcacaggctggttaggcatgagcagagttgtacgtggagaatttttaaaattgaaaaatcaagagtttgtcatggcttcgaaaacattgggggcttcaaaattcaaattgatatttaagcatattttacctaatacgttaggtgctatcgtggttacatcaatgtttacagtacctagtgctattttcttcgaagcatttttaagtttcattggtataggtgtacctgcacctcaaacatcgttagggtcattagtaaatgatgggcgcgcaatgttattaatttatccacatgaattatttataccagcaatgattttaagtttattaattctattcttttacttatttagtgatggattacgtgatgcatttgatccgaaaatgcgtaaataaaagggggcatagcatatgactgaaagaatattagaagtaaatgatttgcatgtttcctttgatattacagcaggggaagtgcaggcagtgagaggtgtagatttttatttaaacaagggggaaacattggcaattgttggtgaatcaggttcaggtaaatctgtaacaacaaaagcaattacaaaattattccaaggggacacaggaagaattaaaaagggagaaattttatttttaggggaagatttagcaaaaaaacctgaaaatgagttaattaaattacgtggcaaagatatttcaatgatctttcaagatccaatgacatctttaaacccaacgatgcaaattggtaaacaagtcatggaaccattaattaagcacaaaaattatagtaaagcacaagctaaaaagcgcgcattggaaatactaaatcttgtaggtttaccaaatgcagaaaaaagatttaaagcatatcctcatcaattttcaggtggacaaaggcaaagaattgttattgcaaccgcattagcttgtgaacctaaagtgctcattgctgatgaaccaacgactgcattagacgtaacgatgcaggcacaaattttagatttaatgaaagaactacaacaaaaaatcgatacagcaattatttttataacgcatgatttaggggttgttgcgaatattgctgatagagtggcagttatgtatggtggtcaaatggttgaaacaggagatgttaacgaaatattttatgatccaaagcatccatatacatggggattattatcgtcaatgcctgatttatcaacaacaaatgacacaccattactagcgattcctggagcgccacctgatttattacacccacctaaaggtgatgcatttgcgagacgtagtcaatatgcattagatattgattttaaagtagaaccaccgtggtttaaagtttcaccgacacattttgtgaaatcttggttattagacgcacgtgcaccaaaagttgaactacccgagctggtaaaacaacgtatgaaaccgatgcctaataattatgaaaaaccactcaaggtagaaagggtgtcgttcaatgaaaaatgatgaagtgctattatctattaaaaatttaaagcaatattttaacgcaggaaagaaaaacgaagtgagagcgattgaaaatatttcgtttgatatatacaaaggggaaacattaggtttagtaggagaatcggggtgtggtaaatctacaactggtaaatcaattattaaacttaatgatattacaagtggagaaattttgtatgagggtattgatatacaaaagattcgtaaacgtaaagatttgcttaaatttaataaaaagatacagatgatttttcaagacccatatgcgtctttaaatcctaggttaaaagtaatggatatagtagctgaaggtattgatatccatcatttagcaactgataagcgtgaccgaaaaaaacgtgtctatgatttacttgaaactgttggattaagtaaagaacatgccaatcgctatcctcatgaattttcaggtggacaacgccaacgtattggaattgcccgtgcattagccgttgaaccagaattcattatcgcggacgaaccaatatcggcattggatgtttcaatccaagctcaagtagttaatttattattaaaattacaacgtgaaagagggattacgttcctatttatagctcatgatctatcaatggtgaagtatatttcagatcgtattgcagtcatgcattttgggaaaatagttgaaattggaccggcagaagaaatttatcaaaatccattacacgattatactaagtctttattatcagccattccacaacctgatcctgaatcagaacgcagtcgcaaacgatttagttatattgatgatgaagcaaataatcatttaagacaattacatgaaattagaccgaatcactttgtctttagtactgaagaagaagcggcacaactacgagaaaataaattggtgacacaaaattaaggggaagggggaaatgcaatgacgagaaaatttagaacacttattttaattttgattgctacaattgcattaagtggttgtgctaatgacgatggtatttattcagataaaggtcaagtattcagaaaaattttgtcatcagacttaacatcccttgatacatcattaataacggatgaaatatcttctgaagtgactgcgcaaacattcgaaggtttatacacattaggaaaaggtgacaaaccggtgttaggtgttgcgaaagcttttcctgaaaagagtaaagatggtaaaactttaaaggttaaattaagaagcgatgctaaatggagcaatggtgacaaagtgactgcacaagactttgtttatgcttggagaaaaacagttgaccctaaaacaggttctgaatttgcatacattatgggggacattaaaaatgcgagtgatattagtactggtaagaaacctgtagagcaattaggtatcaaagcattaaatgatgaaacattacaaattgaattagaaaagccggttccatatattaatcaattattagcacttaatacctttgcacctcaaaatgaaaaagttgccaaaaaatatggtaaaaattacggtacggcagctgatagagcggtatacaatggtccatttaaagttgatgattggaaacaagaagataaaaccttactatctaaaaatcagtattattgggataaaaagaatgtaaaattagataaagtgaattataaagttattaaagacttacaagccggtgcatcattgtatgatactgaatcagtagatgacgcagttattactgcagatcaagtaaataaatataaagacaacaaaggattaaactttgtgttaacgactgggacattttttgtaaaaatgaatgaaaaacaatatcctgattttaaaaacaaaaatttaagattggctatcgcacaagcaatagataaaaaaggatacgttgattcagtgaaaaacaatggctcaattccttccgatacactaacagccaaaggaattgcgaaagcgcctaatggcaaagattatgcgagtaccatgaattcgcctttaaaatataatcctaaagaagcaagagcacactgggacaaagctaaaaaagagttaggtaaaaatgaagtgacattttcaatgaacacagaagatacaccagatgcaaaaatatctgctgaatatatcaaatcgcaagttgagaaaaatttaccaggagttactttgaaaattaagcaattaccgtttaaacaaagagtatcactagaactgagtaacaattttgaagcatcacttagtggttggtctgcagattaccctgatcctatggcttatttagaaacaatgaccacaggtagcgcacaaaataatacagactggggtaataaagaatatgatcaattacttaaagtagcaagaaccaaattggcacttcaaccgaacgaacgatatgaaaacttgaaaaaagcagaagaaatgttcctaggagatgcaccggtagcaccaatttatcaaaaaggtgttgcacatttaacaaatcctcaagtaaaaggattaatttaccataaatttggtccaaataactcacttaaacatgtatatattgataaatcgatagataaagaaacaggtaagaagaaaaaataatatgctttgtaaattaggctggagacatatctccagtctttttgtgttggataaaaactttgggaataaaaatttaaaataagtcgttttttaaattactgaaattgattaaatgcataaataactgaatattctaaaaataaacttgtaataattttttctatgagtaaactaaaaagaaaaaattagattgaaagtaggaggcatatgtatggggaagctaattaaatatatttcaatacttcttattgtcgttttagtgttgagtgcttgcggaaaaagcagtaataaagatgaaggagtaaaagatgctactaaaacggaaacctcaaaacataaaggtggtaccttaaatgtagcattaacagcaccgccaagtggtgtttattcttcgttattaaatagtacacatgcagattctgtagttgagggatattttaacgaaagcttattagcaactgataaaaaaatacgtcctaaggcatatattgcttcatggaaggacatcgagccggctaagaaaatagaatttaaaattaaaaaaggtattaaatggcatgatggtaatgaattgaaaattgatgattggatttattcaattgaagtcttagctaacaaggactacgaaggtgcttattatccaagtgtagaaaatatccaaggtgcgaaagattatcatgaaggaaaaactgatcatattagcggattgaagaaaatagatgactacactatgcaggttacatttgataaaaaacaagaaaattacttaacaggatttattactggacctttattaagtaaaaaatatttatcagatgtaccaattaaagatttagcgaaatcagataaaatccgaaaatatcctattggtattggaccgtataaagttaagaaaatcgttccaggtgaggctgttcaactcgttaaatttgatgattattggcaaggtaagcctgcactagacaaaatcaatttaaaagttattgatcaagctcaaattattaaggcaatggaaaaaggcgatattgatgttgcgaatgatgctaccggtgcaatggcaaaagatgctaagtcatctaatgctggtctcaaggtattatctgcgccaagcttagactacggtttaataggattcgtatctcatgattacgataaaaaagctaataaaactggtaaagtgagaccaaaatatgaagacaaagaattacgtaaagcaatgctttatgcaattgatagagaaaaatggattaaagcgtttttcaatggttacgctagtgaaatcaatagttttgtaccatctatgcattggatagcagccaatcctaaggacctaaatgattacaaatatgatcctgaaaaagctaaaaaaatcttagataagttaggttataaagatagagatggtgacggatttagagaagatcctaaaggtaataaatttgagattaactttaaacattattcaggttcaaatcctacttttgaaccaagaactgctgcgataaaagatttctgggaaaaagttggcttgaaaacaaatgtgaagttagtagaattcggtaaatataatgaagacttagcaaatgcatctaaagatatggaagtgtacttcagatcatgggcaggaggtacagatccagatccatcagatttataccacactgatagacctcaaaatgaaatgagaacagttttaccaaaatcagatcaatatttagatgatgcattagacttcgaaaaagtaggcattgatgaaaagaaacgtaaagatatttatgttaaatggcaaaaatatatgaatgatgagttacctggattaccaatgttccaaggtaaatcgataactattgttaacgataaagtacgaaacttagacattgaaattggaactgatcaaagtttatataatttaactaaagaagcttagtaatgtaacctcgacgattttgtcgaggtttacttatatggggggatgttatgaataatgtattgttagaggttaaagatttagaaacatcattaaaaataaataatgaatggttagcaactgttgaaaatatttcttttgaattatctaaaggagaagttttgggtatagtaggggaatctggttgcggtaagtccatattaagtaagtcaattattaaattattaccagaaaagatatctaaactaagtagtggagaagttatatttgatggtaaacgaatcgatacgctcaatgagaagcaattgctagatattcgaggaaatgatattgctatgatttttcaagaacctatgactgctttaaatcctgtatttaccataaaaaatcaacttgtggaatctataaaatcacataaaaaaatttctaaaaaagaagcaaataacttagcaaaagatttactaaaaaaagttggaattgctagacaagatgaaatattaaatagctatcctcatcaattatctggtggtatgagacaaagagtaatgattgcaatggccatttcatgttctcctaaattattaattgctgatgaacctacaacagcattggatgtcacgattcaagcgcaaatattagacttattaaaagaattgcaaaaggaaacgcaaatggcaattatgatgattacacatgatttgagtgtagttgctgagttttgcgataaagtcttagttatgtatgcaggtcaaattgtagaatttggaggcataaaagaaatactacacaatccgaaacatccttatacccaaaaattattatcaacaattccaaaacttaaagaagggcagaaacgacttgaaacgatagaaggaattgtgccatcaatccaagcatttcacgttaataagtgcagatttgcaaatagatgtaacaaaaaactggatatttgtaataatcaatctcctaaaatgcatgtttgtgaagacgtcattgtacgttgtcatttgtacaaaaatgaatataaggagatataagaatggaaaatattttagaagtcaaccaaataaaaaaatactacaaaattaaaactggattattacaaaaaactcagtacgttaaagctgttgatgacgtatcgttttcaataaaaaaaggacaaacttttggattagtaggagaatcgggttgtggtaagtcaacgttaggtaaagtgattatcaggcttgaagatgcaacttcaggttcaataattgttaatggtgaagatataacaagattacaaggtaaaaaactcagaaaatcacgacaacaatatcagatgatatttcaagatccgtatgcatcattgaatccgatgcaaatggttggagatatcatttcagaacctattttaaattataaaaaattgccaaaagaagaaataaaaaaagaagtactatatttattaaaatgtgttggcctaagtgaagatgcatattataaatatgcacatgaattttcaggtggacagagacaaagagtgggaattgcaagagcattggctttgcgtccgagtttaattgttgctgatgagcctgtaagtgcattagatgtatctgttcaatctcaagtactgaatttattaaaagatttacaagagcaatttaagttaagctatttatttatcgcgcatgatttaagtgtagtgaaacatattagtgatgtaattggagttatgtatttaggtcatatagttgaaattgcatctgataaagaaatttatgaaaatcccaaacatccatatacaaaagcattaatttcatcaataccacaaattgataaacataataacaatagaattatattaaaaggagaattaccttcgccaagtaatccgccgcaaggttgtccttttcatacaagatgtccgattgcaaaagataaatgtaaagaaaatataccacaattaaaggacattggtaacgaacatcaagttgcttgtttctacgtagataaagtaggtgatttaaatgcttaaattaatacttaaaaggttagggttaatgatcccgttactaattttaatctcaatagttgtattttcattagcaatcatacaaccaggagatccattttcagatttacaaaacggtaaaataaaacaagaagcaataaatgcacaaagggaaaagttaggcttcaacgactcaataccacatcaatatattagatgggtcaatcatgttatacatggtgatttaggggagtcaatcaaatataagaggccggtaattgatgttattgaggaaagaattccaaatacaatattactcggtgctatgtcattaattattacttatattatctcatttgctttaggaataacgtcaggtagatattcttacagtttgactgattatactgtgcaaatatttaattatttgatgttagctattccatcttttattgcgggagtatttgcaatttttattttttcttttgaattacaatggtttccgtttcaaggttctgttgatattaaccttaaagaaggtacttttgaatattatatgagtaaaatttatcatacatttttgcctgcattaactttaggattattatctactgctggttatattcaatatttacgtaatgatattattgaaaattctaaaaaagattatgtattgacggcaaggtcaaaaggattatctatgaataaaatttataataaacatatattgagaaattctttaatacctattattacatttttaggtgctgatattgtaagtattttaggtggagctgtgattactgagactatcttttcatataacggtatcggtaaattatttttagaatcggtaataggtcaagactatccattaatgatggcattaacgttatttttctcatttttaggtttattgggtaatttgatttctgatattacttatggatttatagatccaagaattagaagtaactaggggggattggaatgcaaaataagtcaaaatcgccttttaaaattgcattgtctagatttattcataataaaattgcaatgttatcgattatttttttattaatcataactattgtatcaattatagcgccattaatagctccttttccagtgaaccaacaagatttattaaatataaaaggtgaaatgacagcacaaaacattcttggtacagactctggtggtagggataactttagtcgtttgttatatgcaggtcgtatttcattatccattggaattacatctacaataggaatgcttttgattggaattacagttggagtgatttctggttattttggaggtattgttgatacattattaatgagaataaccgaatttgttatgttatttccatttttaatatttgcaattgtattaaatgctgcacttggagataaaattaaaaatccttatggatctgccataattcttgttctagttattatcgtattaagttggggaggtattgcaagacttgttcgtggtaaagtacttcaagaaaaagaaaatgaatactttttggcagcaaaatcaattggtacacccacatataaaattattttgaaacatcttttgccgaatatattaagtgtagttatcgtacaagcaacattgttatttgccggtatgattgtagtggaatcaggattgagctttttaggattcggaattagtaaagcaataccatcttggggtaatatgttgagtgatgctcaagaaggggatgttataagtggtaaaccgtggatatggatgccacctgctataatgattacattaactatattaagtataaactttgtaggggaagggcttaaagatgcttttaatcctagaggtagacgttaaataataaaagaggcactagttaattctagtacctctttattttatctcttacgtcctaatcccatcgctttttccatttttttgacagttttaaatgaaactttgtgtgctttatctctaccttgatctaaaatatcatcaagtttatctgagttatagaaactttcgtatttttcttggaattctactaaaaatgctttaactatttcagcaaggtcacctttaaatttaccataaccttccccttcatattttgcctcaatatctttaattggcatgtcggttaatccagcgtatattgaaattaaatttgttatacctggcttgttgtcacgatcaaatttaataataccatctgaatcagttactgcgcttttaatttttttagctgcaacattcggctcgtccaataatgaaatgaagtttttagcattatcatcactcttactcatttttcttgttgggtcttgtaaactcatgacacgtccaccaactttaggcatacgaatttcaggtttcacaagcacatcattatagcgactattaaatctatctacaaggttacgagtcaattcgatatgctgcttttggtcatctccaactggaacgatattagtattgtaaagaacaatatcagctgccattaaaggtggatatgttaatagaccagctggtataccttcaactgctttctgagctttatctttgtattgcgtcatacgctctaattctccaacagaagcaatcgtagttaacatccatcctgcttgtacgtgtgcagggacttcagattgtatgaacaatgttgctttgtctggatctataccagaagctaaataaatcgctgctaattgtctggtctgtttacgtaattttaaacgatcttgtggcattgtaattgcatgttgatctacgatacagaaataacaatcatagtcattttgcacatcaacaaattgttttagtgcgccaatataatttccaatagtaggaattccactaggttggatgcctgaaaataatgtctccatttaaatgcctactttcttagtaatattttaataattatcattataacagtatttcttaaaaatgtaagatgtgttagaatatacgtataacttactactaacaaagggattaataatcttttttataagtgtagaaacttatctgaaaaattaggtttttctcatttaattttaatgttagatagttataataaatagtaacgattaagaattttagaaaaaaatgttttttcttgatctataactaaattttaagcaatgaattttattcattcaaataggagagtgagatgtatggtaacattatttacttcaccaagttgcacatcttgccgtaaagcgaaagcatggttacaagaacatgacattccgtatacggagcgtaatattttttctgaacatttaacaattgatgaaattaagcaaatattaaaaatgactgaagacggtactgatgaaatcatttctacacgttctaaaacataccaaaaattaaatgttgatattgattcactaccattacaagacttatattcaatcattcaagataatcctggcttattacgtcgtccaattattttagataataaacgactacaagttggttataatgaggacgagattcgacgtttcttacctagaaaagttcgtacgttccaattacaagaagcacaacgtatggttgactaataaccatttaactatgtgtcatactttactaaaagatatgtcaagcaacactatttctatagtgttgcttttttggttttaattttacaataattgcttagtatcttttaaatcaaatgtgcaattgttaatatagctctatattagagtgttttggatgaaacatttgctatgataaggtaaaattaaattaagaaagtgctttaatgctttaactgtataaatcatttaaatagttttgctacaacgaatatgttattataagttaccaaaatattttagagaaagaaatcaaacaaataaattgtattttgtttgatgctttaatacaatgtggatactattcatcgactgtaaggagtgagatgatatgagaatagaacgagtagatgatacaactgtaaaattgtttataacatatagcgatatcgaggcccgtggatttagtcgtgaagatttatggacaaatcgcaaacgtggcgaagaattcttttggtcaatgatggatgaaattaacgaagaagaagattttgttgtagaaggtccattatggattcaagtacatgcctttgaaaaaggtgtcgaagtcacaatttctaaatctaaaaatgaagatatgatgaatatgtctgatgatgatgcaactgatcaatttgatgaacaagttcaagaattgttagctcaaacattagaaggtgaagatcaattagaagaattattcgagcaacgaacaaaagaaaaagaagctcaaggttctaaacgtcaaaagtcttcagcacgtaaaaatacaagaacaattattgtgaaatttaacgatttagaagatgttattaattatgcatatcatagcaatccaataactacagagtttgaagatttgttatatatggttgatggtacttattattatgctgtacattttgatagtcatgttgatcaagaagtcattaatgatagttacagtcaattgcttgaatttgcttatccaacagacagaacagaagtttatttaaatgactatgctaaaataattatgagtcataacgtaacagctcaagttcgacgttattttccagagacaactgaataacgatattaattaagcaacgcactatgaaaggagactctttggagtctctttttttattgatttcaaaagctgaaaaagtaatagtagttaaacttacgtgtaatattttgaggtgaagatatgttagtagctttaaatgaagaaaaggaacgtgtgttagcaactactgcattgagaaagacacaatatttttgtccggtgtgtggcaagcaagttattttaaagcgtgggctcaaagtaattagtcattttgcacataaacatttagcggaacaaaaatgttttaataatgaaacgattaaacattataaaagtaaattgattttagcacagatgatacagcaacaaggatgtaaagtagagatagagccatttttaaaagaaataaaacaaattccggatattttgattaataataaatatgttattgagctacagtattcgccaattccttataaacagattcttcaacgaacggaaggtttaaagaaaatgggatataaagtaagttggttattaaatgatgttgattattgtcataataaagtgaagttcaatcattttcaaagtatgtttattaatccaatcactcgaaaacttcatacgttcaatttagagaaaaaacaaataatgatgtttcaacaaatacaatatttaggcgggcacaaatatgtcgctgaaaaaaggaatgccaaaattagtgagttgtttaatgaggcgccttgtgattatcatgctgtttataaattatcaaagttcgcaattaatcaatatatcaaatattgtcgctggcaaaattctgttttagaacccactttaagtgcaatatatcaattacagttaactgatcaagaagtagtgcacaattatggttatatttttccagagcaaatttatattgaaaatcatccaattgagtggcaattacaagttgatttatggttaaagaatggaaaaagcaaattagtaagtgacaatcttaattattttaaactgaaaaagtttattgttggtctagaaagtaaaacagcaattatagaaaaacttattaacaattatttaaatatttgttcagatagaggtaatgacgtgcaaattttgttctaaaatgagaaaattatatcaattatattttattaggaggtttactacatatgagtcaacaattatctagagaagaacaggaacgtaaatatcctgaatatacatgggacttaacaacaattttcaaagatgatgaagcttttgaggctgcatttaaagaagttgaaaatgagttaggcaaagaagaacaatttaaaggacacattggtgatagtgctgagacattatacaatgcattagaattagaagatacattaggtactaaattagaaaaagtatatgtatacgcgcacctaaaacaagaccaagatacaacgaacgacaagtatactggtatggagtcaagagcacatcaattaattattaaatttagctcggcatggagtttcttagtgccagagattttacaaattgatgaagataaaattcaatcatttgtaaattcatatgataaattacaaaaattcgcatttgatttgaagttgattaatgaaaaacgtcctcatattttagatgctgaaactgaaaagttattaacagaagcgcaggacgcgttatcaacgccatcaaatgtatacggtatgtttagcaacgctgatttagtatttgaagatgcgattgataaagatggaaatgcacacccgttaacacaaggtacatttattaagtatttagaatcagatgatcgcaaactaagagaaagtgcttttagaaatgtatataaagcatatggtgctcataataatacgcttggcgctacgctagcaggtgaagtgaagaaaaatgtatttaatgctcgtacacacaattacaaaactgcaagagaaaaagcattaagtaataatcatattccagaaaatgtatatgacaatctagtaaaaactgtacataaatatttaccattgctacatagatatactgaattgcgcaaagaattgctaggtttagatgacttgaaaatgtatgatttatatacaccattaattaaagatattaagtttgaaatgccttatgaagaagctaaagagtggatgttaaaagctttagaaccaatgggtgaagaatatttaaatgtagttaaagaaggcttaaacaatcgttgggtcgatgtctatgagaataaaggtaaacgttcaggtggctattcatcaggtgcacatttaactaatccatttattctacttaactggtctaatactatttcagacttatacacattagttcatgaatttgggcattcagcacatagttacttcagtagaaaattccaaccgtcaaattctagtgactacactatttttgtcgctgaagttgcatcaacttgtaacgaagcacttttaagtgattatatggataaacatcttgatgatgaaaaacgcttattattattaaaccaagaattagaacgtttcagagctacattattccgacaaacaatgttcgcagaatttgagcataaaattcatgcaattgaagaagcaggtgaacctttaacaccaactagaatgaatgaagaatatgccaaattaaataaattatacttcggtgattctgtagaaactgatgaagatattagtaaggaatggtcacgtattccacacttctatatgaattattatgtatatcaatacgcaactggttacagtgcagctcaaagcttaagtcatcaaattttaacagaaggtaagccagcagtagatagatatattaatgaattcttgaaaaaaggtagctcaaattatccaattgagatattaaaaaatgctggtgtagatatgacaacacctgaaccaattgaacaagcttgtgaagtttttgaacaaaaattgaacgcttttgaaaaattaatgaaagcttagcactattgtattcgcttacattatgaacagattgtgacaatttaaattaagtactattaaaaggttgaaatggtagagatagcatgttatattatgaacatgaaattaatcacataacaaacatacccctttgtttgaagtgaaaaatttctcccatcccctttgtttagcgtcgtgtattcagacacgacgtttttttatgttcttttttaataagagggaagtggagttgtataaaaatgtattaaatatgcactttttatacattaacgattcatatatgtctattatgtaccaaatttataatttgtataattttcgaactggttaaattcgaaaaatatcactaatatatttagatcgatgtgtaacattacgttctaataatttaatgttgcaaaattaagaatcagtaaaaagacctcgttacatttatggtgtacgaggtctttaatttatttattttgatttgattttaggcattttagatttccagaaatcgccatctggatatttaagtttttcaattttttgttgaatggctaacttctttaactctttgtttaaaagtttttctggccattcataaatagtaagtaattcttccatcgttacaagttgttgttgctgtatataagtttctaatttaggaggaagattcttttcgataggtttacccatcaattcattaattatataagtatagatgtgatatgggtataatccttcgacttttaaaccttcttcatgaacatcttcactaaagaaaacgagagaaggggcttgttcgatttccatttctcttgcaatatgcaaatcaattttcaagctttcggttagtttacttttttgtaagtcgtctttaaatacttctaaatcaatacctgcattttgaatacagtcacaaatcattgattctgtaataatatctcttttaggtatgatttcattttgcattaaatgtataaatcgttcggcacgtacacgaccttgtaactcagctgctttataagctagggcgatgttatcaaagttggatgtactttgagcttggcatttcgttaatacttttaacgaaggatttaatatatgtctgatacgtatatattgattatattcaattcttaatttggataagattgctgataatttgaagcaatcggagctaaatggatcgaaaaatgaataaatttcgattttacttacaggtgatagattaatatcttcacgactcttattttccattattcgtaattctccagccatgtttattcacctacaattaattttaggaattcaccatatgattagcagttaatcttaagcgctcaaataaataatctccaacaccttgtggaaacgcagcgcgattaattgctgtctgcatattttctaaccatgcatctctttcaaattcagtgattgtaaaatccatatgtctttttcttagcataggatgtccgtgttcttcggtataaatgtttggaccgcccaaaaactgtgttaaaaattgtttttgtttacgacttgtttctgcaaaatctcctggaaacaggtgattaagtcgttcatctttttctacaagggtgtaaaaataatcaatcatatcgtataacgcttctttaccaatgatgtcatatggtgttgttgtcatttaatcacccattttcaaaaatttactattacgaacttaagttaatatataactaatataacatgattttaaacatttgaaagaaatatgcatatttgccaatttaatttatattgtttgaaagtgtttcttttttcttgaaaaaacgttgaactttatttaaaggttgatgatgttcgaggtttagttcgtttaataaagattggaacttttgtaaaccttgattatagtctttaacttcgaactctaactcataatccgcagtatcgaaatactcacttttatctaaaacgagtaaatcacctttatatttagtttcttggcgatatgtcgttaatgcaccaagtattgataaagttgtatcttttacaccaaactgttcaactataatttgacgaatgtcatctggaagattgtcgtttgaaataatcaagttcatctctggtttaatgtcgacgatatagttgtattctaatagaccaacctttgctggtgtctttaaagtcatttcatattgattgtctttaactcttatgcgtagtgcagagcgatgttcctttaatttgaaatcgggtgtatcaatatagtaattgacttgcttaaaaagcacactgtctttaaaatatttctcttgcaatttattatagattgatgcagttatcatttgtttaaattctatttcatgatttgttgccatgatatgtatacacctcgtatcaaattcaatttatcttaactatattatgaatgacaaagttgaattttaaaagtaatttcctttatctattatcaatgttaatttgaccattaaaaatagtgttcgtaagtgttttgtattattgaattgtgttaaaatgttatggaataagaggaggattaagcatgcgtttatatattaatgaaattaaaattaaagatgacatactttattgttatacagaagattctattaaaggattatctgaagtaggacaaatgctcgttgatagtgataattatgcctttgcgtatacattagatgatggtaaagcgtatgcttatctcattttcgtacaagaaacatggacgatgttgcatgaaaacatgactaaaaaaattattatcaatgatgaactagaattgactgaattccaccaagaacttacttatattttagacaacataaaagggaataataattatggtaaggaatttgttgcaaccgttgaagaaacattcgacattgaataaagcggggtgaagcactatgaatcaatgggatcagttcttaacaccttataagcaagcggttgatgagttgaaagtgaaacttaaaggcatgcgcaaacaatatgaagttggtgaacaagcgtcgccaatagaatttgttactggtcgtgttaaaccaatcgctagtattatagataaggcaaacaaacgacaaataccatttgataggttaagagaagaaatgtacgatatcgctggtttaagaatgatgtgccaatttgttgaagatattgatgttgtcgtcaatattttaagacaaagaaaagattttaaagtaattgaagaacgagattatattcgtaacactaaagaaagtggttaccgctcgtatcatgtcattattgaatatccaattgaaacattacaaggccaaaaatttatattggctgatattcagattcgtacattagcaatgaatttctgggcaacgattgaacatactttacgatataaatatgatggtgcttatccggatgaaattcaacatcgtttggaaagagcggcagaagcagcgtatttacttgatgaagagatgtctgaaattaaagatgaaattcaggaagctcaaaaatattacacgcaaaaacgttctaaaaaacatgaaaatgattaacgaggtgttataaatcatgcgttatacaattttaactaaaggtgactccaagtctaatgccttaaagcataaaatgatgaactatatgaaagattttcgcatgattgaggatagtgaaaatcctgaaattgttatttcagttggtggtgatggtacattactacaagcattccatcagtatagccacatgttatcaaaagtggcatttgttggagttcatacaggtcatttaggattttatgcggattggttacctcatgaagttgaaaaattaatcatcgaaattaataattcagagtttcaggtcattgaatatccattgcttgaaattattatgagatacaacgacaacggctatgaaacaaggtatttagcattaaatgaagcaacgatgaaaactgaaaatggctcaacacttgttgtggatgttaacttaagagggaaacactttgagcgatttagaggcgatggattatgtgtatcaacaccttcgggttcaacggcttataacaaagcgctaggtggcgcactgatacatccttcacttgaagcaatgcaaattacagaaattgcctcaataaataatcgtgtgtttagaacggtaggatcaccacttgtattaccaaagcatcatacatgtttaatatcaccagttaatcatgataccattagaatgacgatagatcatgttagtatcaaacataaaaatgttaattcaatacaataccgtgtagcaaatgaaaaagtgaggtttgcacgttttagaccattcccgttctggaaacgtgtacacgattctttcatatcaagtgatgaagaacgatgaaatttaagtatcatatatcacaacaagaaactgttaaagcttttttagcacgacatgatttttctaagaagacagtgagcgccattaaaaataatggcgctttaattgttaatgatgaaccagtcacagtacgtaagcaattaatgccaaatgatatattagaaattcatttaccgcgagaaataccgagtgttaatttaataccttatgctcgtaagctagaagtattgtatgaagatgcttttatcatcatagttactaaaccaaacaatcaaaattgtacgccttcgagagaacatcctcatgaaagtttaatcgaacaagtactatatcattgtcaggaacatggtgaaaatattaacccacatattgttacgcgtctagatcgtaatacaactggtattgtgatattcgctaaatatggacatatccatcatttattttctaaagtaaacttgaaaaaaatatatacttgccttgtatatggcaaaacccatacatctggtattattgaagctaatattagacggtcaaaggatagtattataactagagaagttgcctcggatggtaaatacgctaaaacatcttatgaagtaataaatcaaaatgataaatacagtttatgcaaagttcatttgcatacgggacgtacacatcaaattcgtgtacattttcaacatattgggcatccaattgtgggagattctttgtatgatggttttcatgacaaaattcatggtcaagtactgcaatgtacgcaaatatattttgttcatccaatcaaaaagaacaatatttatattacaattgattataagcaattacttaaattattcaatcaactctaattcacacagggggtgtaagtatgtcaatgaacacagatgaaaaagagcgtgttcaagaggaattatacgaccaaactttattagatcaatacttagaaaatgatgatattgatcaatttagagatgaatttctagcattacacacatatgaacaaagtgagtattttgaagatactaccgatgaaaatagacaaaagatttttcaatatttatcacctgaagaggttgcaaatttctttgatcaattagatattgatgacgatgaatatgagttgctatttgataaaatgaatgcgacatacgcaagtcacatattagaagaaatgtcatacgataatgcagtagatattttaaatgagttgactaaaccaaaagttgctagtcttttaacattgatgaataaagatgacgcgaatgaaatcaaagcattacttcactatgatgaggatacggccggcggtattatgacgacggagtatttatcacttaaagcgcatacgcctgttaaagaagcgttattattggtcaaagcgcaagcgccagacgcagaaacaatatatgttatatttgtcgttgatgatgatggtaaattagtaggtgttttatcgctaagagatttaattgtagctgaaaatgatgcttatattgaagatattatgaatgaacgtgtcattagtgtgaatgtagcagacgaccaagaagatgttgctcaagttatgagagactatgatttcatggctgtacctgttatagattaccaagaacatttgcttggtatcatcacgattgatgatattttagacgttatggatgaagaggctagtgaagactactctcgtttagccggggtatcagatatcgattcgactaatgattcaatcattaaaacagcattaaaacgtttaccatggttgattattttaacatttttaggaatgattactgcgacaattttagggagattcgaaaaaacattagaaaatgtagcgctactcgcagcgtttattcctattattagtggtatgtcaggaaattcaggtacacaatctttagccgtttcagttcgtaacattacgacaggggaaattaatgagcaaagtaaatttagaattgcattaagagaagcgggaagtggtgtattatcgggtgttgtatgttcaacaatattatttacaattattgttgcaatatatcatcagccacttttagcattaatcgttgcaggaagtttaacttgtgcgatgacggtggggacgtttgtaggttcgatgattccattattgatgaataaattaaatatcgatccagcagtggctagtggaccatttattacaacaattaatgatattattagtatgttgatttattttggtttagctacatcatttatggcttacttaatttaaggaggagttatggagtttttatctttagttattgttgttttagcagcgtttttaactccaataattgtcaatcgattaaatattaatttcttgccagttgttgttgcagaaattttgatggggattgtgattggaaattcatttctaaatatagtagaaagggattcaattctaaatattttatcaacgttaggctttatctttttaatgtttttaagtggtttagaaattgattttaaagcttttaaaaaagataaacgcgcacgtcaaggacaaaatgatgatgaatcctcaattccagggcatcttaatctagcgttaactgtatttgcatttattatgattatttcgattcttttagcgtatgtatttaaatggcttggattagtggatgatgtgttattaatggtcattatcatttcaactatttccttaggtgtagttgttccaactttaaaagaaatgaatattatgagaacaactatagggcaatttatcctattagtagcagtacttgcggacttagtaactatgattttattaacggtctatggcgcaatcaatggtcaaggcggcagtacaatatggttaataggtatattagttgttttcacagcaatttcatatattttaggtgttcaatttaaaagaatgtcatttttacaaaaattgatggatggtacgacgcaaatcggtattcgtgcggtatttgcattaataatattattagtagccctagcagagggagttggcgcagaaaatatattaggtgcattcttagcaggtgtcgttgtttcattattaaatccagatgaagaaatggttgaaaaattagactcatttggttatgggttctttattcctattttctttataatggttggtgtagatttaaacataccttcattaattaaagaaccgaaattactaattatcataccgattttaatcgttgcatttatcatttcaaaattaattccagtcatgtttattcgacgttggtttgatatgaaaacaacgattgcatcagcatttttattaacatcaacattatcgctcgtgatagctgcagccaaaatttcagaaagattaaatgctatttcagctgaaacgtcaggtatattaattttaagcgcagtcattacatgtgtattcgttccgattattttcaaaaaactgtttccagttccagatgagtttaaccgtaaaattgaagttagtttaattggtaaaaatcaattaacgattcctatagcgcaaaatttaacatctcagttatatgacgtgacattatattatcgcaaagacttgagtgatcgtcgtcaattgtcggatgatatcacgatgatagaaattgctgattatgaacaagatgttttagaacgactaggtctgtttgaccgagacatagttgtttgtgccacgaatgacgatgatattaaccgaaaagttgctaaattagccaaagcacatcaagttgagcgtgtcatttgcagacttgaaagcacaacggacgatacagagttagttgattcaggtattgaaattttcagtagctacttaagtaataaaatcttattaaaaggtttaattgaaacacctaacatgttgaatttattaagtaatgttgaaacgtcactatatgaaattcaaatgttaaattataaatatgaaaatattcaattacgtaatttcccattcggaggagacatcatcttcgtgcgtattatccgtaataatgagtcgattgttccgcatggagatacacaattgcgatatggagatcgcttaattgttaccggtgctaaagaatacgttgatgaattgaagcaagagttagaattttatttttaacaataatgatattaaaatgcagacgtattttagtacgacgtaaaattaatgattttaaaatgctagtatgtatatgattttgataaataaatgctttttacgtaaatcaagtttgatacagaaaggactaaatcaaacatttatcgttgtaatacgtttaaataactttattaaaaagtcataatagtgttaaaatgtattgacgaataaaaagttagttaaaactgggattagatattctatccgttaaattaattattataaggagttatcttacatgttaaatcttgaaaacaaaacatatgtcatcatgggaatcgctaataagcgtagtattgcttttggtgtcgctaaagttttagatcaattaggtgctaaattagtatttacttaccgtaaagaacgtagccgtaaagagcttgaaaaattattagaacaattaaatcaaccagaagcgtacttatatcaaattgatgttcaaagcgatgaagaggttattaatggttttgagcaaattggtaaagatgttggcaatattgatggtgtatatcattcaatcgcatttgctaatatggaagacttacgcggacgcttttctgaaacttcacgtgaaggtttcttgttagctcaagacattagttcttactcactaactatcgttgctcatgaagctaaaaaattaatgccagaaggtggtagcattgttgcaacaacatatttaggtggcgaattcgcagttcaaaactataatgtgatgggtgttgctaaagcgagcttagaagcaaatgttaaatatttagcattagacttaggtccagataatattcgcgttaatgcaatttcagctggtccaatccgtacattaagtgcaaaaggtgtgggtggtttcaatacaattcttaaagaaatcgaagagcgtgcacctttaaaacgtaacgttgatcaagtagaagtaggtaaaacagcggcttacttattaagtgacttatcaagtggcgttacaggtgaaaatattcatgtagatagcggattccacgcaattaaataatatcattcaatagctttgttcacgttattatatatgtgagcaaagcttttttgcttttataataatcggactgatggaaaattatttgatatttcatctgactgatttttttatgcacaaaaaaatctcctcaaaagctgtagtttcaacttttgaggagatagtatcttatattcttaaaagacatccacagaattagtccttaacattactgtttgctttatcaataatgcgttggcggtatttgaaaatattactaacaaccgttttaagtacagcatataatggcactgcaatcagaactaatgtaaagccacctaaatctcctgctgctaaaataacaacgataattgttaaaggatgaatacttaaagatttacccattacatttggtgtaatgatattaccttcaagttggtgtgcaattaatgtaatgatacaaacccatataaatgtagtaggactatctataataccgagtattgctgcaggtgcaaatgataaccatgaacctaagaaaggaattaagtttgcgacaccagcaaatagtactaataaaggaatatatggtaagtcaataattgaataaccgatatataagaatatacctaaaataacactgacagttacttgaccttgaatgtaagattttaatgtaaagtttaaatcagttaataaatctacgaaaaatactttacgttcacctttgaaaaatttagcaacagctgggataaatttttcatggtcttttaacatataaattaagaagaatggaaccataatcaataagaagatggttgaaattaatgatgtaatgtactgtaatgaattagataaaatattagtaacgccatcacccattgatttaaccatatttgtaattctacttgttacatcttcaggtaatttatccatttgagctagtgcgaatttaataatttgctctgcttctttttgtagggcaggtgtctgactaattaaattgttgatatttgaaatgatgattggtgcaacaaacgcaacaattaagccgataatagcaaacaaagctaacatgattgttgttatactagcccatcttggaaaaccgactttttcaagtaagttttgaaaaggtagacagatataaaataaaaaaccactaattaaaaatggaagaaatacagaaccgatgattgtagctattggagtaaatacttcgtgcacttccataaatagtttgatgagaatgaacagcataatcagagcgatgccagttcggaaccaaaccttgtttaacataaacgatgttcctcctatttttctaaacttagttattatttagtatatcctaaatagcagtgcttaaaaaggttaatattttttaaatatacttaaattaaccattcactttctattttaagatatttactttcaatagtttgtgagacttttcaatgactcgtaagtctgcaattggatcaaacagcaccagtttatatgaataacttattttaatattaaacgtgtttaaatagtgaaatgatcatattaatatttataagaatattctgaaaaatatattgaagtgtctcgtgcttaatcgtataatatttttatgtttaaacaatagggggaatcttatgattgaaaaattagtaacctttttaaatgaggttgtttggagtaagccattagtttatggtttgctaattactggtgtgctatttacattgcgtatgcgattttttcaagttagacattttaaagaaatgattcgattaatgtttcaaggagagaagtctcctaatggtatttcaagttttcaagcgatagccatgtctttagcaggcagggttggtacaggtaatattgtcggtgtatctactgcaatatttataggaggacctggtgcagtattttggatgtggattactgcgtttttaggtgcaagtagtgcttttattgaatctacacttggtcaaatattcaagagagttgaaaataatgaataccgtggtggaccagcgtattatattgaatatggtattggtggtaaatttggtaaaatttacggaattatctttgctattgttacgattatctcagtaggtctattgcttcctggtgtgcaatctaacgctatagcaagttctatgcataatgcgattcatgttccacaatggttaatgggtggtattgttgtagttattttgggattaattatttttggtggtgtacgtagtattgccaatgttgcaacagccgttgtaccatttatggcaattatttacatactgatggctgtcattatcatttgtatcaatatacaagaagtgccagcgttatttgcattaattttcaaatcagcatttggattacaatctgcttttggtggtatcgttggcgcaatgatagagattggtgttaaacgtggattatattcaaatgaggctggtcaaggtacaggtccacacgcagcagcggcagcagaagtatcacatccaagtaaacaaggtctagtacaagcattttcagtttatattgatacattatttgtatgtactgcaactgctctgattatacttatttctggtacatataatgtgactgatggtacggttaatgcgaatggcacaccgcatttaattaaagatggcggtatttatgttgaaaatgcaacaggtaaagattattcaggtactgcgatgtatgcacaagccggcattgataaagcgttccatggcagtggttatcaatttgatcctactttctctggcgtaggttcgtactttattgcatttgctttattcttctttgcatttactacaattttgtcgtactactacattacagaaacaaatgttgcttatttaacgcgtaatcaaaataatcaagtttcatcgatatttattaatattgctcgtgtgattattttgttcgctacattttacggtgcagttaaaacagctgatgtagcatgggcattcggtgatttaggtgtaggtctaatggcttggttaaatatcattgcgatttggattttacataagcctgccgtaaatgctttaaaagattatgaaattcaaaagaaacgtttaggcaacggttataatgcagtttatcaacctgatccgaataaattacctaatgctgtcttttggttgaagacgtatccagaacgtttaaaacaagcacgtgccaaaaagtaatctacttttgtttatagtatatgtagtgatcatttgataaaaaagaaaagtattgagaattttaggtgctcagaaatttgaattttaaaaatatagtgtctcttggtacaataacaatacaactactagggggcacttttttatgtcagaatttaaaactggtaagattaataaacatgttttatatagtaatattttaaatagagatgtcacgttaagtatttatttaccagaatcttataatcaacttgttaaatataatgtcattctttgctttgacggattagattttttacgtttcgggagaatacaacgtacatatgaatcgttaatcaaagaagcgcgtattgatgatgcgatcattgttggattccattatgaagacgttgataagcgtagagaggaatttcatccacaaggaagtcgttctcatttaactattcaatcagtcggtaaagaaatattgccatttattgactcgacgttttctacactgaaagtaggtaatgcaaggttattagtaggggatagtttagcgggtagtattgccttattaacggcgttgacctatccaacgatttttagtcgtgtagcaatgttaagtccacattcagatgaaaaagtattagataagctaaatcaatgtgcaaataaagaacaattgacaatttggcatgtcattggtctagatgaaaaagattttactttaccaacaaatggtaagcgtgccgatttcttaacaccgaatagagaattagctgaacaaattaagaaatataatataacttattattacgatgaatttgatggtggtcaccaatggaaagattggaaaccattgctgtcagatatattattgtattttttaagtaaaaacacagatgatcaactttatgaataatatgttcttatataactgattattgtagtggttttatcttcaaaagagggcaattttagggcacttaggtattatattaagagaaaggcatattcctgcaataacaacggataaagagcttcaagaaggtgaaatgtatagaatagtgaaggggggatttacagtgaataataagcttatatatacctcttatgatggcgataacataccattgatagatagttttattaaacttgttattgattttaaatatgttccaataaatccaactaaatcattaggatattatatatctacatcgattcatgacaatgacaaaggtgagtgtttaaaagactgcttgtctttggaaatgatttgtgatgaactttgggtattcatagacaataataaatatattccagaaggagttcggttagaaatagctacatggttaaaatataaatcctctccagttaagtatataagcataccttctttattagagaattcgagtataaatgacgatttatttttagactttgatgattcaaatatacttaaagaaaaggaaatttccgaactagtaccgaaaaaaagtgagttaagacctgtaaattgtattaatatactaccggaacaccataaatatatagactggataaagtatcatttattttataacaaattcgtaccattggattatttaagtataaagccatatatttattttgataatatagaacattataaaagtgagttatcgctattgaatgaacgatgtaattacatttctgtgatgccatattatgtgagtgaaaataattttaatttatctttttcagaatgtaaaatacctaaatatattaagaaagattgggctataacaacaatggagaataaaaattaacatggatatatcattaaatttcaatcattatattgatttaaaaaagagcattaaaaatttatgcttaatgaaaaagtttgagccatatgtaaccaatgaaaattatgattttattgaaatgcctctggtagtagaaggaaattatgtgctcttaaaaatttatcaagaaacagacgctttaattaaacttcattatcaggaagtattaaactctaatcgaaaaagtgtaatacaagaaagtgatatagttagaatttcgcgaagcatacttaatgaagctcttgatatcaatagtaatataaaatataaatatgatacttttggattaactattatatccgatgcagataattacacaacattaatacggactatacttgctcagcaagtgagcatagaacaagccaataaactatttttattatttattaatacttatggtgaaatttttgaactaaacaataaagaatacacttttttaaattgggataaaatattcagtcgaatatataaagaacagaaggttttagtaggcacgactaataatagaaagcaggctatcataactcttgctgaattacatataaaaaacggcttaagagaaaatgttttacaagttattccaagtataaaaggtataggtgcttggacagtgcaaatgtttatgctatttcaatttcctcacgtagcttttgaaaatattcctgtagcagacattggtttgcacagagccatagaaaaaaatcatgatcttccacataaatcgattgataaaagtaatggagaatcttactttcaaaacatgaaatctatagatgtgtttaaatattggtatatatacatggttgaatagctagtttgaatcgtctactcttaattggacaaattctatgaggatagatattgtgattaaagaaaataggcgattttatttggcaggagaaagaagaacatttaattcagagtttaagttataaatggttagattatatgaaatttggaaacaaaggaatgaaatagtatgcgagtatgatttaacaccttccgcgttagggaaatggataaagcatcatcaaaacacaggttgattcaatcatcaagatagcttaacagatgaagaaaaagagctgattaaattactcaaagaagtttaatatttaaaaatggagaacgatattttaaagttagcagcgttgatcatgggatgaaaatagaaatcattcaaaagaatgcgcatcaatattcagtatcagtattgtgtaaaatcttaaaaataccaaggagaacttattatgaattaataataaggaataatcagacctaaaaacatggtgaatcagaaatataattataggtacgtttaatttttaatataaaaaaatggtaaaatacgaattaaaaacaacataaatgacgaaggtttcactgtatcaagacgaaagattgattgtatcatgataaaacatcatctagtttctgtttatacgaaatttaaatacaaaaattattaaaaatcatttaaaccgcacttttaatagaaatcaaccaatgtagtattgaatgatttaacatatgtaaaagtcacaggaacatgggattacatatgtttgtttttaggtttatttaggctgtctagataaatttgacgatgatatagtttggtctataatataatttataaaagattttactgtttgatttaatttaaatttgacgaaattgcaaaagatgtataatgaattatttttaatgtaacggttttcaaagaaatttgatataatagcaataggttaaacaaaggaggaattcagatgattttaggattagcattaattccatcaaagtcatttcaagaagcggtggattcttaccgtaaaagatatgataaacagtattcacgaattaaaccacatgtgacaattaaagcgccatttgaaattgaagatggtgatttagattctgtcattgaacaggttagagctcgtattaatggtataccagcagtagaagttcatgctacaaaagcttctagcttcaaaccaacgaacaatgtgatttactttaaagttgcgaagacggacgacttagaagaattgtttaatcgctttaatggagaagatttctatggagaagctgaacatgtttttgtgccacactttacaatagcacaaggactatctagccaagaattcgaagatatttttggtcaagtagcattagctggggtagaccataaagaaattatcgatgaattaactttgttacgttttgacgatgacgaagataaatggaaagttattgaaacgtttaaattagcttaagtaacataatagtattgttaatcgtagtatgtttgaattaataagaaaatggtcatttttattgaatgtaataaaaatgaccattttctttattttaaaatacgttttaaccttacttagctttttctctatttgctataaagtagcttccataaaatacagctaagactaaaaagattaatgccgagaaataaaatgtattgtttaaattgttggtaaattgtgtaattaatccgccaaataatggccctatcattgagccgaatccttggatactattaaaaacaccccaagtttcttcttgttcatctgatttgataaatcgtgccataaaggtattccatgctggtaataagatgccatacattagaccgatagctaaagcgataatccacacgatgtgaatattaacaatcatagatagagtaaaaattaatatcatgtataaaataaatccgcttagaataacaccatacataaagtttctgctgcggttatctattagtttcgataaaaatagcatcgaaactgcacagccgataccaccaataatgattgcaacagtatattcaattgtgcttacgttaataaccttagtagcatatgttggtaatataggaactagggcagcaattgcggcaccttgtaaaagaataccagggaacaacaataaatggcgctttgtcacatcaacaatttgtctcaattgagctttaactggacgagtattataatttgttaactttacatcgacaaaataatataatatccatgcaattaaaacgactaaagacatcatgaaggcaaagcgtgttgggtgcactttgataagtagattcataaaaaccatacctaccaataggcctaacaaccatgaaaaataaacatagcccatttgtttgccacgtttatcttcttcaacactggataacataatgacccaaataggactaactgcaataccgagcatcatagcactaaatatgattacaaaaggtgatgctggaaaccaaataactaaaaataaacttgtaaatgctaaaataaatccagtcgttaaaacgatttttgtgccgaattttttcagtaaaaatcctataacaaagtttgtagatgcatcagcaataaaatgtattgaaaatgctagagacgttattgctacagcaatggatgtaactgttggcaagaaattaatatagcttaggatatacatgcctctcgcaaattccattaaaaataagataataagcattaaaatgaaatttttatgattagcgtaattatttaacgaagaatcttgcatataaaggaacctttccataaatctcttgtggttgtgatgaatgaccgattaaatcaagtaagtctcgacatattgtctgtgtagcatacttaattttatcttgttccattgtactaatcatgttagttaattgctcattaccgttcgttaaacttgctacaatttttattgcttcttctggattatcagcgattttaccaaaacctttttcttcaaagtaaagggcattttcaagctcttgaccaggtgcaggatttaggaaaatcattggaatacaacgggcgaaaccttcagttattgtgataccaccaggtttcgtaatcataagttgacttgatgccatccattcattcatgtgtttggtataacctagaatcaatacattctcgttagatttaaacttagctattaaagaacgctttagctctttgctcttaccacaaatcataactacttgtgcatttgcacttttcgctaatatatcagtaatcatcgtgtcaaaacctttagatacaccaaatgcaccagctgacattaaaatagtttgcttatctggatctaagttgttgtctattaaccactgcttttgattaataggcgtttcaaatttgttatcaataggaatacctgtcactttaactgttgaaggatcaatacctacgtctatgaagtcttgtttcgtttcttttgttgccacataatatcttgttgaatacggcgtaatccagtttttatgtaagcgatagtctgtcatcactgtagcaactggaatattaatgttaaattgctcagttagtaccgacataactggtgtaggaaacgttaataatattaaatctggcttttcttttatcaataaattaattaacttattaagtccatagtatttgtaaaaacatttgtctagtttatctgggcggctgtaataaaaccctttgtacatatttctaaaatatttaaagctattgatataccattttttacaaatagaagtcaaaattggatgagcttccataaataaatcgtgctcaatgacgcttaaatggtctagattcatatcattaagttgattaacgatactctgtgtaacttgcatatgaccgttaccgaatgagccagtaataatcaatatctttttattttgagtaaccattaatagccaccctccgttagtttgaaaattttatttaagtgtaacttattttacggcattataaaagaaataaagacgcaaagtcgttacatttatagcaattttaatcaatagatgaattgatacaaaataaaacgttattttataaagcaatttattgttctatgttttatttgtatatttaaaattatccagtatacaattatagcatatttttggaaacaattatgatattataccatgttacaagatggttttaataatttaagatgagccataattgtaaaactaattcataataccgtatgttttatttttaatagtagaaattagaaaatgctgattagtaggatataacagtgaaattataaatttattaacatcaacaaaacgtgtataataaacatattgtagaaaaaggagcggttcagtttggatgcaagtacgttgtttaagaaagtaaaagtaaagcgtgtattgggttctttagaacaacaaatagatgatatcactactgattcacgtacagcgagagaaggtagcatttttgtcgcttcagttggatatactgtagacagtcataagttctgtcaaaatgtagctgatcaagggtgtaagttggtagtggtcaataaagaacaatcattaccagctaacgtaacacaagtggttgtgccggacacattaagagtagctagtattctagcacacacattatatgattatccgagtcatcagttagtgacatttggtgtaacgggtacaaatggtaaaacttctattgcgacgatggttcatttaattcaaagaaagttacaaaaaaatagtgcatatttaggaactaatggtttccaaattaatgaaacaaagacaaaaggtgcaaatacgacaccagaaacagtttctttaacaaagaaaattaaagaagcagttgatgcaggcgctgaatctatgacattagaagtatcaagccatggcttagtattaggacgactgcgaggcgttgaatttgacgttgcaatattttcaaatttaacacaagaccatttagattttcatggcacaatggaagtatacggacacgcgaagtctttattgtttagtcaattaggtgaagatttgtcgaaagaaaagtatgtcgtgttaaacaatgacgattcattttctgagtatttaagaacagtgacgccttatgaagtatttagttatggaattgatgaggaagcccaatttatggctaaaaatattcaagaatctttacaaggtgtcagctttgattttgtaacgccttttggaacttacccagtaaaatcgccttatgttggtaagtttaatatttctaatattatggcggcaatgattgcggtgtggagtaaaggtacatctttagaaacgattattaaagctgttgaaaatttagaacctgttgaagggcgattagaagttttagatccttcgttacctattgatttaattatcgattatgcacatacagctgatggtatgaacaaattaatcgatgcagtacagccttttgtaaagcaaaagttgatatttttagttggtatggcaggcgaacgtgatttaactaaaacgcctgaaatggggcgagttgcctgtcgtgcagattatgtcattttcacaccggataatccggcaaatgatgacccgaaaatgttaacggcagaattagccaaaggtgcaacacatcaaaactatattgaatttgatgatcgtgcagaagggataaaacatgcaattgacatagctgagcctggggatactgtcgttttagcatcaaaaggaagagaaccatatcaaatcatgccagggcatattaaggtgccacatcgagatgatttaattggccttgaagcagcttacaaaaagttcggtggtggccctgttgatcaataaaagatttattgatgaaggtaaaactattgatgtttatttattcgaagcattaaataaccagataatcattgctataccagattggttttggtcatatcagatggcaatgacattagatgaagaaacttgttttgaagcaatactcatgcaattgtttgtttttaaagaagaggaagaggcagaatcgattgcatcacaactaacagattggatagaaacatataaaaaggagaaagactaatgaacttaaagcaagaagttgagtctagaaagacttttgcgattatttcacatcccgatgcagggaaaacaacgttaactgaaaaactattgtacttcagtggtgctattcgtgaagcgggtacagttaaagggaagaagactggtaaatttgcgacaagtgactggatgaaagttgaacaagagcgtggtatttctgtaactagttcagtaatgcaatttgattacgatgattataaaatcaatatcttagatacaccaggacatgaagacttttcagaagatacgtatagaacattaatggcagttgacagtgctgtcatggtcatagactgtgcaaaaggtattgaaccacaaacattgaagttatttaaagtttgtaaaatgcgtggtattccaatctttacattcattaataaattagaccgagtaggtaaagaaccatttgaattattagatgaaatcgaagagacattaaatattgaaacataccctatgaattggccaattggtatgggacaaagtttctttggcatcattgatagaaagtctaaaacaattgaaccatttagagatgaagaaaatatattacatttgaatgatgattttgagttggaagaagatcatgcaattacaaatgatagtgcttttgaacaagcgattgaagaattaatgttggttgaagaagcgggtgaagcctttgataatgacgcgctgttgagtggagacttaacacctgtatttttcggttcagctttagctaactttggtgtacaaaatttcttaaatgcatatgttgattttgcgccaatgccaaatgcgagacaaacaaaagaagacgttgaagtaagcccgtttgatgattcattttcaggatttatctttaaaattcaagccaacatggaccctaaacaccgtgatagaattgcctttatgcgtgtcgttagtggtgcatttgaacgtggtatggatgttactttgcaacgtactaataaaaagcaaaagatcacacgttcaacgtcatttatggcagacgataaagaaactgtgaatcatgctgtagcaggcgatatcattggactatatgatactggtaattatcaaattggagatactttagttggtggaaaacaaacctacagtttccaagatttaccacaatttacgccagaaatttttatgaaagtttctgctaaaaacgtcatgaaacagaagcatttccataaaggtattgaacaattagtacaagaaggtgcgattcaatactataaaacattacacacaaaccaaattattttaggtgctgttggtcagttacaatttgaagttttcgaacatagaatgaaaaacgaatataatgttgatgttgttatggagccagtaggccgtaaaattgcacgttggattgaaaatgaagaccaaattacagataagatgaacacatcaagatcgattttagtgaaagatagatatgacgatttagtattcttatttgaaaatgaatttgcaacaagatggtttgaagagaaattccctgaaattaaattgtatagtttactttaacagctcaattgtataatcgaatttgttacattaaaaataattgtttcgttgaagaaaaataaattgtatattttaaaagaaaaaggtatactatgatgtatcaaatgaataacctatggcattttgtcagaggggagtaacttaagaatcatgaccgtataaatgattcgacactttatcgtcattacgaagatatcttccggtaaagtgggcaatttaaattgcttagtgagacctttgctatttatttagcataggtctttttgtttgtacttaacttatttatttaaaggagttgtacatgttaatggatccaagtttgatcttaccttatttatgggtacttgtcgttttagtatttttagaaggcttattagcagcagataacgcgattgttatggctgtaatggttaagcacttaccacccgaacaacgtaaaaaagctttgttttacggtttgttaggtgcatttgtatttagatttttagcattattcttaattagtattatcgcgaacttttggtttattcaagctgcaggagcggtttacttaatttatatgtcaatcaaaaatctgtggcagttctttaaacacccagaaattgaaagtcctgaagctggagatgatcatcattatgatgaatctggtgaagagattaaagcaagtaacaaatcattctggggaactgtgttgaaaatagaatttgcagatatcgcatttgccattgattctatgcttgctgctttagctattgctgtaacacttcctaaagttggtattcactttggtggtatggacttaggtcagttcgtagtcatgttcctaggtggaatgattggtgttattctaatgcgttatgcagcaacatggtttgtagagctattaaacaaatatccaggacttgaaggtgcagccttcgcgatcgttggttgggtaggtgttaaattagttgtcatggtattagcgcacccagacatcgctgtattgcctgagcacttcccacatggcgtattatggcaatctattttctggacagtactaattggattagtaattatcggttggttaggttcagttgttaaaaataaaaaatcgcataaataattgatgtgaagcggacaatcttaatttagtttaaggttgtcctttttcatttaattgagtgatttatgaaaaatggattttgaagaatgtgaatcaaaagatgcgatatagtattaagaaaatgtgccttttatatttagcattttttcaatagaaattatatagattttaaagcaaattaggtgttaatgtgtcataatgataagtgattttattgaatggagtggacattagtggatattggtaaaaaacatgtaattcctaaaagtcagtaccgacgtaagcgtcgtgaattcttccacaacgaagacagagaagaaaatttaaatcaacatcaagataaacaaaatatagataatacaacatcaaaaaaagcagataagcaaatacataaagattcaattgataagcacgaacgttttaaaaatagtttatcatcgcatttagaacagagaaaccgtgatgttaatgagaataaagctgaagaaagtaaaagtaatcaggatagtaagtcagcatataacagagatcattatttaacagacgatgtatctaaaaaacaaaattcattagattcagtggaccaagatacagagaaatcaaaatattatgagcaaaattctgaagcgactttatcaactaaatcaaccgataaagtagaatcaactgaaatgagaaagctaagttcagataaaaacaaagttggtcatgaagagcaacatgtactttctaaaccttcagaacatgataaagagactagaattgattctgagtcttcaagaactgattcagacagctcgatgcagacagagaaaataaaaaagacagttcagatggaaataaaagtagtaatctgaaatctgaagtaatatcagacaaatcaaatacagtaccaaaattgtcggaatctgatgatgaagtaaataatcagaagccattaactttaccggaagaacagaaattgaaaagacagcaaagtcaaaatgagcaaacaaaaacctatacatatggtgatagcgaacaaaatgacaagtctaatcatgaaaatgatttaagtcatcatataccatcgataagtgatgataaagataacgtcatgagagaaaatcatattgttgacgataatcctgataatgatatcaatacaccatcattatcaaaaacagatgacgatcgaaaacttgatgaaaaaattcatgttgaagataaacataaacaaaatgcagactcgtctgaaacggtgggatatcaaagtcagtcaactgcatctcatcgtagcactgaaaaaagaaatatttctattaatgaccatgataaattaaacggtcaaaaaacaaatacaaagacatcggcaaataataatcaaaaaaaggctacatcaaaattgaacaaagggcgcgctacgaataataattatagtgacattttgaaaaagttttggatgatgtattggcctaaattagttattctaatgggtattattattctaattgttattttgaatgccatttttaataatgtgaacaaaaatgatcgcatgaatgataataatgatgcagatgctcaaaaatatacgacaacgatgaaaaatgccaataacacagttaaatcggtcgttacagttgaaaatgaaacatcaaaagattcatcattacctaaagataaagcatctcaagacgaagtgggatcaggtgttgtatataaaaaatctggagatacgttatatattgttacgaatgcacacgttgtcggtgataaagaaaatcaaaaaataactttctcgaataataaaagtgttgttgggaaagtgcttggtaaagataaatggtcagatttagctgttgttaaagcaacttcttcagacagttcagtgaaagagatagctattggagattcaaataatttagtgttaggagagccaatattagtcgtaggtaatccacttggtgtagactttaaaggcactgtgacagaaggtattatttcaggtctgaacagaaatgttcctattgatttcgataaagataataaatatgatatgttgatgaaagctttccaaattgatgcatcagtaaatccaggtaactcgggtggtgctgtcgtcaatagagaaggaaaattaataggtgtagttgcagctaaaattagtatgccaaacgttgaaaatatgtcatttgcaatacctgttaatgaagtacaaaagattgtaaaagatttagaaacaaaaggtaaaattgactatcccgatgtaggtgttaaaatgaagaatattgccagtctaaatagttttgaaagacaagcagttaaattgccaggaaaagttaagaacggtgttgttgtagatcaagttgacaacaatggtttagcagatcaatctggtctgaaaaaaggtgatgtaattactgaattagatggcaaacttttagaagatgatttacgctttaggcagattatatttagtcataaagatgacttgaaatcaattacagcgaagatttatagagatggtaaagagaaagaaattaatattaaactaaaataatgttgaggtgaacaacgtgtcaatttttagccagtttttaaaaagatcaagccctcaacaaggtattgtattgtactatatcgtcgcaattgtcattgcatttttattattaaacttaccgtatgttcataaaccaggtgtagaagtaaatccaattgacacattatttgttgccgtatccggaattagtgttactggattgtctccgataagtattgtcgatacctattctacatttggacaattaattatcctcgtgatattaaatattggtggaattggcgtcatggcaattggtacgatgttatgggtggtactaggtaaacatattggaattagagaacgtcagttaattatgttagataataacaaaaacacaatgagtggtaccgtcaaattgattattgatattgtaaaatcaatatttgtaatcgaactcgtaggagccatgttattagcattttacttttatcgagataatccagatttaaaatatgcaatcatgcaaggtgtttttgtttctatttctgccactaccaatggtggattagatattacaggtaagtcattaattccttatgcacatgattattttgtacaagcgatagttatatttttaataattttaggatcaatcggcttcccagtattattagaagttaaagcttatattcaaaatagggttactaattttagattttcattatttactaaaattacgacatcaacatatttattcctatttattgttggggtattagccattctattatttgaacataaccatgcgttcaaaggtttaagttggcatcaatcgttattctattcgctgtttcaatcagcgactacaagaagtgcgggtcttcaaacaattgatgtgacaacactaagtgaccccactaatattatcatgggtattttaatgtttataggatcttcgccaagttcggttggtggcggtattcgtacaacaactttcgctattttaattttgtttttaattaactttagtaataatgccgataaaacatccattaaagtttacaatagagaagtacacattatggatattcaacgttcatttgcagtatttacaatggcgacaattttaacatttttaggaatgctaattatatcagctactgaaaatggtaagcttacatttttacaagtattttttgaagttatgtctgcatttggaacttgtggactatcgcttggtgtcacaagtgatattagtgatatttctaaggtcgtactaatgatactcatgtttataggacgtgttggcttaatatcatttatcattatgatagcaggacgtcgagaaccagataaattccattatccaaaagaacgtattcaaataggataatataatagcaatctaagtttagttaatgtagattttaactggaacttagattgcttttttagtttgtatttttaacttattttataagacgattggtttcgaaaatggtaaactagtaacaatgagaggtgtaacatgatggaaaaaaatgaaaacattaatgtagagattttaactacgtcagatatgcatagtcatttcttaaatggtgattatggttcaaatatttatagagctggtacttatgttaaccaagtaagagcacaaaatcatcgcgtcattttattagatagtggcggaagtttagctggctcgttagcggcctattattatgctattgttgcaccttataaacgacatccaatgataaagttaatgaacagaatgcattatgatgctagcggtgtgagtccaagtgaattcaagtttggtttatcatttttaactcgttcaattgctttggcacgttttccatggttatcagcaaatattgaatacaatgttactaaggagccttatttttcaactccatattgtattaaacattttggtgacttaaaaattgctatcgtaggcgtcacagcagatggtttaatggaaaatgagtattctgaaatggagcaagatgtatctattgaaaagacattagtggcatcaaaacgttggattagatatatccatgaagttgaagagccagattttttgattgtaatttatcatggtggattgaataaaattagtaatagtacgaaaaataaaaaggcaagttcgaatgaagctgaaaaattaatggaagaactcggtgttatagatttaatgattacagctcatcagcatcaaacaatagtaggtcaagatcatgaaacgtattatgttcaggctggtcaagatgccaaagagcttgtacatctttcgattaattttaaaaagagaacaacaacttatgatgttgaaagcattgattctaaagtgattgacttaaatgagtatgaagaggatcaagaattattagatttaacattctatgatagaaaagcagtggcttattggtcacaggaaatcataagtgataaaggtttgatgttatcagtaaatgggttacaagatttagtctgtcaaacacatccattttcgcaattattacatgatgcaattcaccttgcatttgataatgatataacatgtgtccacgtgcctatgaacggagagaaggggttgagtggacagattcgaaatgaagatttgtatcatgcatacccatatccagataagccaatggatatgacaattagtggtcaaaatatcaaagatatattggagtatagttattcacatttagattttgttaacgagcaattaagcttaacaattattgatgaaacgttatgtacaatgtggcaaggattcaattatgagattgatatgaatcaagaacctgggcaacgagtaatgctagatcaaattgatttgactaagagttatagagttacaatgactgactattgttatcgtaactacaagaattatttgaaaaatgctattatacatgaatcatacgatgaaacaatgagtacattaattgcagagaagttaagagatccgaattatcgtatttcatgtagtgataattttatagttaaaaacaggtaaatattgctatgtaataaattaattataagttcaacaagtataaaaacctttcttagagaagattatctaggaaaggtttttagaattttaaaattgatataaaagaacagtgaaattctcattcattatatataagtaaacaaaaaagctaaaatggtatataccattttagcaagtaacggaaacggagggattcgaaccctcgcgccgctttcgcgacctacacccttagcaggggcgcctcttcagccaacttgagtacgtttccaatggctccacaggtaggactcgaacctacgaccgatcggttaacagccgatagctctaccactgagctactgtggattaatttgtatgtgtttgaatatcaagcacaaatattattataacaagattaagttaatttgcaatagataccttaaaaaaatatgcagaacatttacactatatttataaaacattccgcatattttaaaaataaacaatttatttatcttcaaataaagaatagcgtgtcaatgcttcaaacacattcaatgtggctttattataatctattggttggtcgggattttttgatatcatgcgagattgtttatctaccatgtaatagtaaaaaatggaattgttatattgatgccataaactgtggtatgaaacatgaagaatgattgattcattattaataaatgtcactttacatttacgattttttaattctttaatactttcgatataatgcatatttaaccaaatattttcattttgtctgtcagaatgtgttgggaaaaaataagttggaaataatggtgttagtaaaataggtggtttactagaaatgccagtaatgcggtttgtctctgctttcttgccaagataagtattaccataaaatttgcaagagcgttcaatgattttctggactttaaaaggattttgaatacgcgttttgtcaaaccgaattatttcactaccgtttctttgatcgtcatcatcaaatgctggtcgaataaccatgtctcctttgcgtatcacataaatattttgagaatacataagcaaaacctcgctttattaagttttaaaccattaatataaaaatacaattaatgatataaagatattttataataaaattctgagttgtcaagttattattttggtgaaaatgtacaataatttttaactaatagtcagaatattcattgatttcaaaattagaaaaatgtatacttattataaattaaagaaaggtagtggtttctatgaaatacaatactaatgttaaacatacaactttagaagcgtttgtcacaactgtcaatgatttgggtattgaattaattatcaatgaagcacttcgagaggtaagaaaacgacagctcatagaacttatagatgacgcactcgtcaataaagatgaagcagcatttaatcaatatacggcagaatacaaaaatttggaggcatttctcggtgaataacattgattcgaattccataacgcaatcataaaaggactattcttaacatctcatacatgtaagaatagtcctttaatcgtttatgacattaatctaattaattcatgtctatctatgtcaccgaaataatgatataaatcatattctgatagtgcttcttctatgtgctcaaagtcgtgtagacagccaactaatgcattttcaagatcagtgacatctccgacaccaaagaaatcaccgaatatttttgcatgttcgattttacctcgtttaacatcaaacttaatttgtacaaatcctttttcaaatttttcctcgcgttcaaagttatatttagggtttctaccataattccattcccaagttctatatttgtcgttacttaacttttcaatattttcccaatcttcatccgttaatttatattcttctacttcagtttctccaaagatagttttcaagatgatttttttaaattcttcaatttctaaagggtcatttaaaaattcttgaatgtttgctacccgtttacgaacagatttaataccttttgatttaatcttagctggattaacttttagtgcattctgaacttcgtctaaatcactatttaacatcaacgtaccatgactaaacattctatttttaactttaaccatagcattccctgagattttcgcttgtccaacttgaatatcgttacgaccagttaattcagcatttacgcctaaagattgtaatgcttgaacaattggttcagtgaatttttggaaattgtggaaactgttaccatcatcatctgttataaaactaaagtttaaattgccagtatcatgataaacagcgccaccaccagaaattcttcttactacatcgatgttgtgagcatcgatatatgtctgatttacttcctctatcgtattttgattctttccaacaatgatagatggtctatttatgtaaaataaaaagtaactttcttctgctggtaaattttttaaaacatattcttccattgctaagtttaaagttggatctgtaatattattattactaatgaatttcattacaatctctcccttatatctatatatattctctacttatttatgccttaactttgctcaaaatgccaattatatactcacaaatcattctaaatatcggcttaaagttacattttattatttttgattgttaatagtttatttgttaagtgaattttagtacaatataatttagttatgatttaaggaggacttaaaatgactgttgcagaagtgggtaacattgttgagtttatggatggattaagaggtcgtgttgaaaaaatcaacgataactctgttattgttgacttaacaattatggaaaattttaatgaccttgatttaccggaaaaaactgttatcaatcataaacgatataagattgttgaataagaaggtaagttataatgaataaaatctcgaaggctttaacttggtttattataagtttcattatatttcatctcatattatttattatgtggggcgaacaccaagaatactggtatttatatacaggtataatgctaattgctggtatcagttatgtattttatcaaagagatattgaatctaagcggttgcttacatcaattggtgttggtattattacggcaattattttaattatgcttcaacttttattctcacttataacttctaatttaagttatagttcattaattaaagaattagcaagaacaggtgtcaattggaagtggcaaatgttagtaactttactttttgtcattccatgtcacgagttatatatgagaactgttttacaaaaagaattaacacatttttcaataccgaaatgggtagctatattaataactgcaatttgttctagttcattatttatttatttagataattggtggatagtaacatttatatttgttgcacaagtgatattatcattaagttatgagtatactcgacgtatagcaacaacatccgttgcacaaattgtagctattatattgttattaatttttaatgcttaaataagcttttcttagacgtatgtgttctaagaaaagcttttttgcttaagaatagcaatacgaagattcgaggcatgcttcattatagtggtaatattttttaacagcaagcggttattattgagattaggttttagtcagtttttattactaaatattttataaaaatggtataatatttttgagtaagttgaattgatggtggctatctgagtaaaggggggtggtgcctatggcattacttaacacttttgaaaggaaaagcctattgtgatatctattgcaaacgcattacatttaatgttaagtttcggtatgtttatcgtcactttcattggtatagtagtagcaataataaatttaagcaataaaaaataaccatcatttcaaaactttgacatagaatgatggttaaagaaaatctcatttagtcaccgtctttttaacgggctcaataggcgacatgttcctgcatgtcgtctttttacatttttatagtaacatatcttttatttaattgtctatttttattagatgtgtaacaaaattttgaagtattttccgtatattgcctgctaaacatgtcagatttgaaaggaaaatcatactgtggtagaaatcaattatgattatatggtagtacttataaataagtgatttctattgaatatgtaatgaagttcatatattaatataactttcattgatatagaagtcgcaatgattaatttaaacaataaaaaacaaccatcatttccaaactttgacaacgaatgatggttaaagaaaatctcatttagtcaccgtctttttaacgggctcaataggcgacatgttcctgcatatcgtctatttatacactgcacaatttaataataatacaattatactttgatgtccatttaacataaagtggttgaaatttgcagcaaataaattaaccttgactattttcagaaaattctgtataaataacgaaaaagagatatggattaaatatgaagaggtgtttttatagaagaataaaatttttggcactatattatatttaactttagcacttggattatcaacagcagcttatgcatctacagaatacgcagaaggaggcacttggagtcatggtgtcggcagtaagtatgtttggtcgtattattatcatggtcataaaggacatggtgcaacagctattggaaaatatagatcatttagtggttatacaagagctggtgtaaaagcaaaagcatcagctactaaacataattggtgggtcaatagagcgtattataacatttattaaatactaaaaaatcatagaaaataaacaacgcaagaggtacaacatgaaatggttcaaattaatacttgatgttacaatcttcattctgattgctatattgttatttgtttatacatataaagaaaacgaagaaatattgcctgatactaaataccctatagcggtaactgactggaataaaaaatatagtaaaaatgagatttataaacgtatagatcaattcgctaaaaatgagaacgtagcaatctataaatcaacttcaaattatacaaacaaaaacgtagataaagatatatatgtatttaataaatcaaaagcagcaactatcactccttttaatgctaaatataacattcattatttaagtgacgacgaagtattaaaaaaagatatcaaagggagttattttgtaaaagacaaaaattttgacgtgtctaaattcataaattttttaaaagaatatggtgttactgctgaatcatacaaaatagatcatatgatgattgccgttggtgtcattaaacaaatgaatatagtagttccattatcctcacttttaatcgtttattttatttattatattttcgaaaagaacattaatttcaaagcgtatgcgattaagtatttaaatggttttacattaagaaaaataattttcgaaaatttttcaaagaaatgcacgtattgggtaacgttaatcataactcaaattcttttaactacaagtgtactttggatattaaattacacgggtaatttagatttattcatattaagaatagttctgctttcatgtcttttcattttaacgattagtgttattaatttatggactttcttaatgttactaaatttaaatattgcaaatatgattaaaggtaagcagcactttaaaacaattcgttttattaatacagtttgtaaaagtattctcttagtactaatagctaatgtaatgatagaaaatactagtgttattaaagatttgaataaaataaaagaaactgagaaatattggaatgtattagatgattattacacgattgaatttgcaccttatcacgaaacaaaacaaagtttgattgataatatggtgcgatcagaacaattagtaaaggctagtgaagcagaaaataatgcgattttattcaaaccaaagggtgactccgttgacaatgacaacttttcgcctgatgaggggaatgtaatattagtaaataatcagttctggtcgatttattacaagcagtttcaacctgatattccgataaaaaatcaaaaaaataatgtcgaagtaattattccacaaaagtttcatgcaatgcgtaatgaaatcaatcaagcatatcattcatggtttgaatttgtacaaaataaaaataataaagagaataagttatctatacagtttatcaacaaaaatgattgtcgaattttttcatttgatgcacgagatagtcgccatttgtcatttatagaggcgccaatcattgtgaatgttcaggcatcagatttatcgaatgatttttattatgccatgatcagtcaaggcgggtatttattcaaaaattatgacgcgctagtaaaaaatattgaaaagtatcatcttgatggggaaatcagtggaataaccaattataaagatagtgtgatggaaatgtatcatgaaaacaatttgaaattaacagtactcaacttttcacaaatcattatcgcaatcattttaataattattattttatttgatgtgaaatattattttgaacagcatcgaaaattactcgtaatcaaaaagctatatggttattcaacattaagagccaattaccaatacttattaataaataatatagttgttatttttattggaatattgacgaatgtaattttacattctcactatataatgatgttatttgcaacgattcttgtcgttcaaatattattgcagatttgcagcctatactatcatggccgacgttttaatgaagttatcaaggagttttaactatgaaatttatcattgcaatattattaggattaatattatccattactattgcttttacaatcatacatcatcctatacttgatcgttttaatcctttcttaaaaacggagtatagttatgccaaagtgccaaaaggtacgcaacaatatgttaatattacggcttatagtgaaagaggggaaaagcttgattataaattaacatttaatggattttcacctagtagaacgtatgtcgaaataaagcataaagggcaatatgtcatatcgatcacatatgttgaaaaagaggatacaccaaaagaggtaagacaagaatgatagaattaaaagatttaaccatacaaaaaggtaatacacatattttgaagaaacttaatttgaaatttcaatgtggaaaatcatatgcacttattggtaaaagtggatgcggtaaatctacattattaaatactattgctggacttgaaaaaacaggaaaacaatatgtctattttaatggtcaattagaacaatttaaatctaatttttacagagataaattaggatatttatttcaaaattatggattaatcgataatttgacagtaaatgaaaatttagatattggattagcatataaaaaaataagtaagaaagaaaaagaacaaataaagatacgttatatagaacagtttggtctgtcaaacagtttaaaaagaaaagttcatacgctaagtggaggtgaacaacaacgtgtcgctttaattagaatgatgttaaaagatccgattgttatgttagctgatgaaccaacgggtgcgttagatcctaaaacaggacagatgattattcaatcattatttggtttggtcgatgaaaataaagtgctgattttagcaacacatgatatggctattgcaaatcaatgtgacgaaataatagatttagaacagtatagaaaagtagcatctatgtgatatccaaaagataaaattaaaagccaatcaatgggaaatgttgacttcaacactccgtttgattggcttttatactgtgttactaagttatgaaagtaacaacggcaaactgaaaaaaagcaatataataatatttaatacgattagtaataaatgtaattgatttttcgttttaatatagcaaaaaacaatgactaaagataacaacaatatcatgattgcacctgggaagaaccataatgctgaagctgtgtaccaaatcattggtaacgccataataataaaagatataagacaagaaaggataccaataatattataagttctagtcaaaattacacctccaattttcactttaaaatgacatgcgtaaaacaatcattttaaatacatcatacaataaaattaaattgtgcggtagaagaatttgaaattaaattgaattggcttgattaaaaggtgattttatagaagataataaaaatggttatttaatagaaaaccataatattaacgacatggctgataaaatacttcagcttgttaataatgatgtattagcagcggagtttggttcgaaagcgagagaaaacattatagaaaaatattcaacggaatcaatattagaaaaatggttaaatcttttcaatagctaaatgaaaaaatcctaggtattcatgagtacctaggatttttacgcatgataaatacaaaaaaagagaggatagtcctctcaaacaatagttaataaaattgtagccatttcttccagctgtaactactaatacaagctaagttcattacgatatgtatgatttcaaattcataaccacttacatatcctcttgtaagtttaagtgtgaagattgagcctaacataacacaaatataaaaaacattaacataaggcgttaaaaagccgataataagtgctaaacctccaacaacttcaccaattgacatcaatactgcgatggtaggtggtaaacctaaagagcctaagaagtgaattgttccatctaaatcaacaaatttcaaagtaccatgcactaagaatgatgttgctaacatccatctaattaaaagcatacctaatttcatcatgtcacctccaacattcatatttttaaaacatagtccaaattatatttgtaaacatgtggaaagtaaagattttttataagattaattattaaatatttattaaatattctattgtattgaacaattgttgtagcaagatgtttaagtcatcagttactttttgtatttataaataaagattagtacagcatagtgcaaagattatagggaaatgaattaactattgcatcgctatttatgaatcgtaaacactattatgaaattgcgagagtagtatggacaattagaatgatggtttgagataaatgagtgttattaaccagtgcgtcattttcaaaattagatgccatttgctgtttataataagaagatttgataattaactatgataagaaaaaataataatcccctaaatacattataaacaaattaaatgataaaataataatatatatttctactaaagttgtttggaggtaaatgtgtgaataggaatatcgttaaactagttgtgttcatgctaattttagttgtagcagtagcgggttgtggtcaaaaagatactgaagagaaaactgaaatgacgacaataaaagatgaattaggaactgaaaaaattaagaaaaatcctaaacgtgttgttgtattagaatatagttttgctgattatttagcagcattagatatgaaacctgttggtattgcagatgatggcagcactaaaaatataacaaagtcagtaagagataagattggggcatatgaatcggttgggtctagaccgcaaccgaatatggaagtgataagtaaattaaaaccggatttgatcattgcagatgttagcagacataagaaaatcaaatcagaattgagcaaaattgcgccgacaattatgttagtcagtggtacgggcgattataatgcaaatattgaagcatttaaaacagtcgctaaagcagtaggcaaagagaaagaaggcgagaagcgtctggaaaagcatgataaaatattagcggagattagaaagaaaattgaacagagtacgttaaaatctgcatttgcattcggtatctcaagagcaggtatgtttattaataatgaagatacatttatgggacaattcttaattaaaatgggtattcaacctgaagtcacaaaagacaaaactacgcatattggtgaacgcaagggtggtccttatatatatttaaataatgaagaacttgccaatatcaatccaaaagttatgattttagccactgacggaaaaacggacaaaaatagaacgaaatttattgatcctgcagtttggaaatcattaaaagctgtgaaagataacaaagtttatgacgttgaccgaaataagtggttgaaatcaagggggattatcgcaagtgaaagtatggcagaagatttagaaaaaattgcagaaaaagcaaaataaaaatacagcgctactcgtaaatcatataagagtggcgctgtatttttaattatgtttattatctgtcggatgtgatgatttacctgaaagtttatttcgaataaatttaattacataaccgacaaggattgttttaacaattcttttaatgaattggcgcatcgttacatacctcatttctctatatcttacgaactatatacccattcatatatgctttttaaacgtcattgtcacaatttaatttttagggaatataatataaccatctttatctgcttttttagtaaaaatgacaaaaatggcatgtattattgagatgatggtagggatacctgtccagaaaaataataagtgaaaaagaccttgtccaaatttatcagcataaaatttatgaatacctaaacctccaagaaataatgcaacaataacataaatggctttattgactttcatttgtaaatcctccttaactataattctacttaaattcgttgtgaaaaccaatatttctaactttagaattttcaaactttctaaaattataagtatatctttttaaaataagctagaatttctatataataaatgttaataacgtaaaagggaatgatgacatagtgatacgtcaagcacgtccagaggaccgatttgatattgcgaagttagtttatatggtttgggatgatatggaattagaattggtaaagcatctacctaaagacatggtattagatgcaattgaaaaaagctgtgttgatgcaacatatcgaactttttatcagcatattttagtttatgaagtagaaaataaagtagcaggttgtattattagctatagcggtgaaaatgaattgaaatatgaaaaagcatgggaactacttgacttaccagaagaaataaaacaatatggcacgccattacctgtaaaagaagctaaagacgatgagtattatatagaaacaattgcgacatttgcagcatatagaggtagaggcatcgcgacaaagttattaacgtcattacttgaatcaaatacacatgttaaatggagtttgaattgcgatattaataatgaagcagcattaaagttatataaaaaagtaggctttaaatctgatggacagattgaattatacaagcacatgtatcatcatttaattgttaaataaaaaaactcgacagttcgatgtaagtcgattgccgagtagtatcattttctattaaatgcctgcaaataatgcactaatataaatacctaatgcatataataaaccgaaaaatgtatttgttttaccagcagcagccattgctggcatcattgtaggcggtgtatcattcttcttgaaacgtctgataactttaacaggcattgggaatgataacaacgcaagtaagtaaaataatgagccaccaggtttaataatgatcgtaagtacaataaaggcataagcgataaagtacatgattgccataaatgttaaagaagcatttttacctaatagaatgggtaaagttttgcgaccacttgctttatctttgacacggtcgcgaatattgttagccatattaattaaaccgatagtgattactataggtacacttaaccaaattacataactttgaatattgccagtttgaataaagaatgcaataacgataataaacatacccataaatacgcctgagaataattcaccgaaaggcgtccatgaaatagggaaagggccacctgtatataggtaaccaacagccatacatactaatccaactggtaataaccaaaatgaagagttagcagctaaaaacaaacctaatattgctgctaagatgtaaaatgcaatggctaatcgtagcacaagctctgggctcataccgttgcgaacaatggcaccaccaatgcctacagattcatgatcatcaaggccttttttataatcatagtattcattaaacatattagttgctgcttgaataagtaagcatgctagtaacatggcaatgaataggctgattttaatatgatcttcgctaccaagaaaatatattttagatgctgctgtaccaactaaaacgggtactacggaagcagttaatgtatgaggacgcattaaatgccaatatttcttaactgtagaatattgctgatattgattactcattgaatacaaaacctctttaaatcatattttttataacaaagatattttaatagaaagtagcataaaggtcaattgacgtgaaaaattgcaagataagtttaagcaattcttgtaacacaattatccaaaaatgatacaatataataatgagtgaaaaaagacgaagaaagaagtgaaatggatggctacgggcgtattagaggacgatattgtcaaagagatatatggcagctcaaaggaatgggtttcagttgaagtgaaattatcacagtcactagacccgagcacattatttcatctcactgacaatgaggcaggagatcgcttttatatgcgtttgaatgataatcgaacgtcatattttggctacaaagcaattcaattattcaaaaataattctaaaaataaacaatctatttttaaagactgggaaaaattaaaacataacatcacatttatacatccgcaatctgagaaacatcatcttcgagttgttggagggttccaattttcaagtcataaatcagatgatgaatggcgagagtttggactaaatcattttgtattacctgaagttttaatttcaactgataaaaatgggacatttttaacttatacagttaaaagggaaagttttactgttgaggcattgaacgatttaatggatttgttcaacaatatatcggacatagatgtggacgagcaaattggggaaattactagaaatgaagatatttataaagatgactggcgtcaacttgtagtagaagctatagaatctattaataatgaagaaaaaattgtactagcacgtagacggttaataaagttcgataaagatatcagtattccatatattctaaagcaagcatattctaaagaaaaaaacagttatatattcttgttagaatcacaagattctatattcttttcacaaacacctgaacaattaataaaggtcaataataaaatactatcgactaaagctgtagcaggtacaattaaacgttcacaagatgaggacgaagatacaaaaaatgttgaagcatttttaaaagataataaaaacttaatcgaacatcgatttgttgttgacagtattttacatgatattaaaccttatatcactgaattacattatgataagacgcctaaaattctaaaaaatgatcatttatatcacttgtacactgaaataaaggcgccactgaaggatgattcgtatattagtttaattgatcatttacatccaacacctgctttaggtggctatccaaaagaatttgcaatggattttattgagcagaaagaatttggtacgcgaggattatatggtgcaccggttggctatatagatatatacgatgattgtgaatttattgttgcaattcgttcgatgcttattaagaaagcacaagcaactttatttgcagggtgtggcattgttaaagattctgatccagatagtgaattggcagaaacgaaccttaagttcacacctatgatgaatgcattaggagtcgatatgaatgggaaatcataaagcagctttaacgaagcaagtttttacatttgcatctgagttatatgcgtacggcgtaagggaagtagttatcagtccgggatcacgctcaacgccacttgcacttgcatttgaagcacatccaaatattaaaacatggatacaccccgatgagcgaagtgcagcattttttgcagttgggttaattaaaggtagtgaaagacctgtcgctatattatgtacgtcaggtacagcagcagcgaattatacgcctgcaattgctgaaagccaaattagtagaattccattaatcgttttaacaagtgaccgtccgcatgaattaagaagtgtaggtgcaccacaagcgattaatcaagtaaatatgtttaataattatgtaagttatgagttcgatatgcctattgcggatgatagtaaagagaccattgatgcaatttactatcaaatgcaaattgctagtcaatatttatatggaccacataaagggccaattcattttaacttgccatttagagatccgttaacacctgatttaaatgcaacagaattgttaacttctgagatgaagattttaccgcactatcaaaaaagtatagatgcatcggcattaagacacattttaaataagaaaaaaggtttaattattgtaggggatatgcagcaccaagaagttgatcaaatactaacgtattcaacgatatatgatttgcctattttagctgatcctttaagtcatttaagaaaatttgatcatccgaatgttatctgtacatatgatttgctgtttagaagcggcttagacttaaatgtggatttcgtaattcgtgttgggaaaccagtgatttctaaaaagttgaatcaatggttaaagaaaactgatgcatttcaaatattagtgcaaaacaatgataagattgatgtctttccaatagcaccagatatttcatatgagatttctgcgaatgatttctttaggtcattaatggaagacacgacagttaatcgcgtaagttggttagaaaaatggcaatgcttagagaaaaaagggcgtaaagaaattaaatgttatttggaacaagctacagatgagagtgcattcgttggtgaattgattaagaaaacatctgaaaaagatgcgttatttattagtaatagtatgcctatcagagatgtagataacttgttattgaataaaaatatagatgtctatgcgaatcgtggtgcgaatggtattgatggtatcgtttcaactgcactgggtatggctgtgcataaacgaataacattattgataggtgatttgtcattttatcatgatatgaatggactattaatgtcaaaattaaataatattcagatgaatattgtattattgaacaacgatggtggcggtattttttcatatttaccacaaaaagaaagtgcaaccgactattttgaacggttgtttggcacaccgacgggattggatttcgagtatacagctaagttatatcaattcgattttaaacgttttaacagtgtttcagaatttaaaaatgccacattattatctgaaacttcgacgatttatgaattgataacgaatcgcgaagataactttaaacagcatcaaattttatatcagaaattgagtgaaatgattcatgacacattataaatactatgaagcaaacgttgagaccaatcaagttttagtattactgcatggttttcttagcgacagtcgtacttattataatcacatcgataaatatactgatatctgtcatgtcatcactatagacttaccaggacatggcgaagatcagtcttcaatggatgaaacgtggaattttgattatattacgacgttgttagaccgaattttagataaatataaagataaatcaataacattgtttggatattcaatgggtgggcgtgttgcattatattatgcaattaatggtcacatccctatatctaatttgatattagaaagtacgtcaccaggtattaaagaagaagcaaatcaattggaacgccgtcttgttgatgatgcacgtgctaaagtattagacatagcaggtattgaattatttgttaatgattgggaaaagttgccattatttcaatcgcaactagaattaccagttgaaatacaacatcaaataagacaacaacgattgtctcaatcgccacataaaatggccaaagcattaagagattatggtacaggtcaaatgccaaacttatggccgcgcctgaaagaaattaaagtaccaacattaatattagctggagaatatgatgaaaaatttgtacagattgcgaaaaaaatggcaaatttaattcctaatagtaaatgtaaattaatttctgctacaggtcatacaattcatgtggaagatagtgatgaatttgatacaatgatattaggatttttaaaggaggagcaaaatgactaacagacaatgggaaacacttagagaatatgatgaaatcaaatatgaattttacgaagggattgctaaggtaacaataaatcgccctgaagtacgcaatgcgtttacacctaaaacagttgctgaaatgattgacgcattttcacgtgcacgtgatgatcaaaacgtttcagttatcgtattaactggtgaaggtgatttagcattctgttctggtggtgaccagaagaaacgtggacatggtggttatgtaggtgaagaccaaatccctcgcttaaatgtattagatttacagcgtttaattcgtattattccaaaaccggttatcgcgatggtaaaaggttatgctgtaggtggcggtaatgtactaaatgttgtttgtgacttaacgattgctgctgataatgctatttttggacaaactggtcctaaagtaggttcatttgatgcgggttatggttcaggatatttagcacgtatcgttggacataagaaagcacgtgaaatttggtacttatgtcgtcaatacaatgcacaagaagctttagatatgggtctagtaaatacagtggtacctttagagaaagttgaagatgaaactgtgcaatggtgtaaagagattatgaaacactcaccaacagcgttacgattccttaaagcagctatgaatgctgacacagatggtttagctggtttacaacaaatggctggggatgcaacattgctttattacacaactgatgaagcgaaagaaggccgtgatgcgtttaaagaaaaacgtgatcctgacttcgatcaattccctaaattcccataagttattttgaatatgatattaagtcacttgcgtcgtttattagcgacgataggtggcttttttattttataagaatttaaaagggcattttaattaattatcataaagataagatagtttgagaaaaattaatagagaaagaataaatgttaaagattattattacaatgaaaaaacgagctggtgagaaattgaattctcgccaacccgctttatgaagtgaaatcatttaaattagttatactaagcgctcataaacgattggtcgcgaagtgccaataccttgtttggatgacgtttgcatgaggatatgctgtgtatcatcataatcaagaatataaatgatttcttcattatcaatagatgaaaatttaatgcgttgatgtgccgtatctataaaaagaatatgatattgattgtgacttgtatcatcgccatgacgtatacaaattgatttttgtaattgatgattactccaattaccaatgaataaattgatattggtttgttctagatgtgtgagtttggttgtgtcgtaaactaaatttataaattgtagttgatacatagttttacctgcctttaatcaatatctatattactttttagtaacctatcattgaaccataccagttataatcacgattgaatgataaatgtaataggcttgaatctgcatcttggattgataattctgtatcccaaggattccagtaaataagtttttcttggtcattaattttagcattaccaacaactgctagcgcatgtcctaaatgtgggtcattagggttttgagatacactttgtgcaaggatcataattcctacattatcttttgtaagttgatcaacttgttcatatgatggtacgccttcttgataatgaatatctctgccttgtgatttaccgtattcaatcatttgattagggaatgttgcacaattaggaaggtcttgctcacttacttcagggtataatgtacgcataatatcatgtgcattataagtgtctgtatttttagttgcatttaataatgctgccatactgaatcctgcacaccatgagttatcgaattgttgttctctaattttgaagttttttaatgtattttcatattgaacttgatcttcttgtatcgcttcgttttcttcaactttagtaggtgttactgtattttttaactcttgtttcaattttgatgaaactgttttagcactttctttttcttttacattaccaggtagtggcgtagcttttactaatctaactttgccatcttcttcaaaataaaatcctttttcatcagtaagaacagtgatatttgaatttttatctttaatttggtctaaatctttagcgatgaagtttgaaattttaacactgtaattcatgtcttcttttgatttgtttaaatcatctttatttttagggctaagtgttaaagtataaacaattttaccgtcttttataactggataatagtaactattatcttcttcaccattaaatttataaattttaaaagcttcgccaagttcatatttaccagtttttgcattactttgtttatctaatgctttagcataaccagcaaattgttgttgtgctagatcttttactttttgaggtactttgtcactcttaacattaatttctagctgtttagagtgtgaatcggctttggctttattgttattagcaaatgcgcctagtgataaaataagcattgaaaccattatgatgcttataatattgaatactctagatttatatgaactattcatataataccctccatttaaatcaaaatattttgcgttgctaagactttgcttctatttactaaatctaaattaagatgaagtttatgcagcgtcagggttgtctgaattattgttatcgccattgtctggattatcagggttgttagggttgtcagggttatttggttcatctgggttgttagggttatcaggattgttagggttatcaggattatctgggttattaggttggtcatcgttggcaaaatggatatcttcaatattttgttttaagaagttgcgtacattttcattaataaataccgcaccattaaattcatttggtacaccgccccaatgaattccgatcacttcatttttttcattaaatacaggtgaacctgagttaccaccagttgtacttaaatcatattgcatagcttcgcctttgaggtaagtgatttttcctttactttcccacattgttgctacaggtttatcaccaggatatcctgttacagtaatattttggttaacttgtgtttcagcattattactcattgttgctggtttaactacttcaccaatatgtttgttttgctcattaggggagaatttaactattgctaaatcaccttcgcctgaatatttagtgatttgttcagcagtgaaaccaccatttggataattgtcttggttaattgcagaagggaatgcttttaaagcatgaggatcaccgtgcgtagcatctacgacgtgtttatttgttaaaagagtatctttacctacaactacaccggaagcaataaatgtaccagtaggtgcttcaacttgaatataagttacgggtgcataatgaccattcgttgtatctgtgatttggtgacgatcgttatttggtaatataacatttgcgtgttcacgttgttctaatggtttaaggttaccgcctttttgaatcttaggtgtttgctgtttgcttgactgtgattgttgcggatgattgtccatagcctttgaagataacgcgtttgctgctggagaactcacaagtgtcgctgttgtcaaagttgcaacgaataaagaactaacttttaaaaatttacctttcatctaaaaacctccaaaaaatttatttacaagttaaatataacactaaaaatttttaagtcaataagaatatataaataaattaaaaagtttttgtaaagattagagtttacaaaaacattaaggggattaaaattgaattgtattatactttattcaattgagttaaattgataagatcctcaattgtttgcatttatctaaaagaataaataagaaaggaattgagagcgaatggaaagtatttgtttataataataaatagtaacttttgaataataattgtttggccaaaggtagattaatatgaatggtgatatattatttgagtgcttaagtttcgaagaacaattataagttagcatattaaaagcttttgatagaatcattttgagtgaggtgtttaaaggagaggaatataactcggtagtatttacagtctctatagagtattatttaaaacttatagaatataaaaaactgaacgtactatgaatttagttcacgacgtccagttcaacatatcatttttatttagtatttaaatatttagcaagtctcttcataccttcttttaaaacatccatttcataagcataggaaatccttacaaatcctttaccgaattctgtaaaggatgagcctggaacgattgctaaatgtgttgattcaagtaaatcgacacaaaattcgaaatcgtcatcggtgatatgtttaatacttgggaaaatataaaacgcgccttcaggttgagcggtaatctcaaaacctaatttagttaattcagatactaaataatttcttcgttctacataagcttcgttcatatatttaggagcttctaatccttcgttaagtgctgttatacatgctatttgagctggaacattggcacaaatacaattataggcgtgcataaatgttaatttatcaatcaaatattgaggtcctaatagaaaaccaattcttattccggttgctgagtgtgatttacttaaaccaccaattaatattaattgattacgaatgtcttcaaattcagcgaaggatacatgtttaccactaaatgtattttcagcataaatctcatcgctaataataaatatcggatatttttttaatacatttacgatatttaaaacttcatttctttttaaaactacgccagttggattagtcggataatttaacaagacagctttggtctttggagaaatatgactttctaacgcatcaggtgtaattttgaattgtgttgctgttgtatcaatataaattggtttaccacctagtacttcgatgagtggtatgtagcctgcataaattggtcccggtattataatttcatctccaggctctatgatagaacgtaacgttgtgtctattgcttcacttgctccatttgtcacaataatttcttcaggatcataggaaaaatgataacgatttttgaagtattgactaattgcttcgcgagtttctaataaccctttattgtgagagtatgatgtcttgtcattgttaatagcatcaatatatgcctttttcacaacatcaggcatcgggaagtctggttggccaatagttaaattaacacaatcatccaaattattcatacgatttgaaaattggcgaatacttggtgctcttaaatatttagaattagaatttaaagaaagtttcatttgtgacacctcaaatataaatcaaatattgtctaaaaatttagaaattaataatatcataacatacttttaaagcaaaaaagggtaaattacttaagctttatttgaaaaacgaaaaatgtctaaatacactgtagtaactacttttcaaaatgaatgaagtggttacagttaatgtacttagacattataaaattatgagtctttaaactgtgatggtctttgtaaattaattattggatttgtccatttacaaacaaagtttgtagataatacatatacgatgattacagatatacttattaaataaagatacgtcattaatgatataggattatcgaatgggtaccattcaaatcctctaacaatgccaataattaaaccatgtaataaatatacgtatagcgtacgactaccaatataagtatataattttttctttgttgacattaaatttagaaacgcagtcattgcgattaatataattccatataatataagtcgtttaaaaggactgaatacactctgtccttcattttcaagtgaagtatatggtgaacttcctaataaccaatctgcattgataggatgaatcacgtaaatgataaaaaacaaaataaaggtaatgatagatactggtattagttttttatttttaaaaatagccgtatgttttttggtgaaaatgtaacctaggtaaaatattgggaaaaatacgattgtccttgaaatgctcaagtagctatcgatgttatctgaaaaacctgctccaatagatataataattgaaactgatagcactttatatggattaaatcttctaactattactaaaatgacatgaaagaaaaatagcgtgatcaaaaaccataacgcaaatactgggttaaaaggatcaagttgtaattcgtcacttttacctgttaagaaataatatattgaaaagaatgcaaaaaatatcatataaggtactatcaaacgttttgaaattttttctaaatagtatggtttatcaatatttttcgcgaaataaccagatataaacaaaaatgttggcatatggaaactataaataactaggtataatgctgataaatatttatcgccactagtgtagggttgtaacatatgtccaaatacgactaataatattaaaattgctcttgcgttgtcaaaaaaataatctctctcttttaatgaagtcatattttatctcctttatgtccataagactcttactaatttattatattttgtattagttatgcaacaaatttgtctattgtgtcgaatagtattgtaaaaattataaaaaaagcatataatattataaataatatgtagtggagtagaacaacatgtataaacaacttgaaaaacttattacactgactaacaatgacttaaacttagtgaatagaagatttggacaacgcacggatatcacatctgaacagctagaacttctccgtattttatttaattacgatcgcttatcacagtatgatttgacgatgaagattagcagggaacaatctatagtttcaaggtggattaagaaattagttttgaaagggtacatcacaagtcaacaatctagcgaagatttaagatgtaaagaattaattttgactgatcaagcacgtacattaatttcacaaataaataatgcacgttgcgaattgattgaagcaagatgtcaatgtttatcggaagtcgaattagacaatttaaatcaattacttgataagttaaatcaacgacgcatatcgttgtaacacgacaatagcaaacacataatttagtgtcgttgtgcacacaacaaaaattgaatcatgaattacaagcaaaagtagcggtgattgttaaaattgatggtaaacaatcaccgctacttttgcttgtgtatgtataaaaaagggatcaaaggtcatcccccatgattgatagtgggggatgacttttgatcctatgttcatgttgcttatttatattgtgggatgtcgaagtatttgccgacttcgccaattttatcatagtagcctttgatgattttagcattgatgttagcccaatctacatctgttgcatattggtgtgttcctggatgtgcaggattccatctcattttgtaaagcgtattttgaccagcttttacatatgagttgccgatgaatttagcaccaccaacgattgcttttgatactgtgtcccaaccagcttgtttagcatatttaataccttcacgtaaaggatcgttatcatatgcagcaataccaaatacgttatggtatttcgtgttagagttagttacaactttgttgttcactacatctgcaccttttgctaattgagaagtaccgttacctgtttctaatagggcatgtgagataagataaacttcattaatgccatacatttgagcagctttgttaaatgcagcaccttggttttctaatacacctttaccttttaagaattgattaattttatcaatagaaatattttgtggttggtctaagcgtaagaattgatattttaatgctggatcttgagctaaacgcttcgtatccattgcatgcttaacatcattaaagttagcatctgtccacttacctggtacacgttgtacttgtggtttatattgtaaaccagcttgtatttgagcaacttggtttaatgtcatacctgtttgattatacttaattaattctttagctaaatcagttgatttaatccatgctaatttaccgttagataatttaccatagtaccaagtttgtccattaatgacttgttctttaacaactgcgaatggttgttcattaaatgcttttaatgagtatttagctgtatcagaatttggtgttacatagtaataaccattaccatttttaattacataagtgtagttataatctttggcagctgatgtagttggtttaacagcagttggtgcagttaaatcttttgcatttacccaaccagtgcggttattaatagtaccgtataaataaacatctttgcctacagatacttgtttcgttgcattaaatgtaccttgagcaatgttattgcctgttaaaatgacttggtttttagtaccccaaggaaccattgataagccgttatttgatttattaacagtatatttttgagttgttttaacttctttgcctaagttttgaacatttaagtcttttacattgaaccaacctaatggaatattatgacttgtattgtttaataatacatatgtttcattaccatgtgcacgttcttttgttacatagaatgtacgatccgcatattttgcgccgtttttcgctgttttttcataaacagaagcacgaataccagtgttgtttggtttaacttgcgcaattttgctaactgtttgagtcgtttgaggtttagtaacagcataagcttttacagctgtttttggttgtgcaacagctttttttggtgcagcaggtacagctaaatatgctttacttacccaaccggatttaccatttacagttccaaataaatagatagatttatcaatttgttgttgcttagtcgctttaaaagtttggttacctgtaccagaaactgcaccagcttcttgtttataagtgccccaaggtactgaatataatttagtgcctggttttactgtatatgtttgcattacatttacaggtgattttgcattgttataaataacgtcaccttgtttaacccaaccaattaaagttggactattgtaatctttaactaagtagaatttgtttccacctaaacttgcttcttttgttacagcaaatgttttttgaacttctttcgttggcttaccagttttgtcataaactgtagtgaataagccattgtttttagcattaatttgagcaacaccgtttaatgatgaaactgttaatttattatttgttgtaggtgttgatggcttaggtgttggtgtaggcgtaggtttagcagtatcaactaaatatgctttacttacccaaccagatttaccattcacagagccatataaataaattgatttatcaatttgttgttgctttgaagccttaaatgtttggtttccagagccagacacactaccagcaacttgtttagatgtaccccaaggtactgtataaagtttcgtaccaggtttgattgaatatgattgatttacatttacaggtgatttagctgtgttgtaaaccacatcgccttctttaacccaaccaaatttattaccagaattgtaatcttgaacaagatagaatttttgattacctaatgtagctgttttagatacagcaaatgttttttgaacttcattagttgctttaccagttttgtcgtatacagtagtatataaaccactatttgttggtttgatttgtgcgacaccattgtttgcagcaactgttaatttaccagttgatggtttcgacggtgttgttggttttgatggtgtagtaggggtagttgtagattgcgtaccccatggcgccactttacccatttttattaaatatttttcattaattaagtcatataattgatcataactataattatgacttcttaaatatccatgtggatcggcatggtcagtaccacctaaatatttacttacagcgtagtgagtccatactgtaccatttccatcatactcagcactgtctggttttaaaccataatattgtaattgtgtagctacatagtcagcatagttattcattgaacgtgcaaatgaagcatagtcgtgtgtgtgtacgatttcaacattgatgaatctagggttaccgactgcaccgacaccccaagataagtaatccgttggtgctgtttcgattatacgatccccatcaacaaatgcatgtacgaatgcgttttgatagttatttttcatataactaatttcaccatttatcgtcgaacgatcattagctgtatcatgaactacgataccttcaggacgacctacgccgttacggtatgcgtatttagggaagtaagatgtataatcttcttcaattttaggtgcttttaagttatttttacgaatgtaatcgttaattgaagagtttacttgtggtttatattttggcaaactcgtttttggtgttgcagcaactgatcttggttgtgctgaagcgctaaaagtagttactttaggtgtcgcttcagttttagctttaggtgctgatgtagttgcagctttaggtgctgcggttttatattgcgtttcaagagctgcaggtttagcagctgatttaattaattctggattaatttgattttctgaattatcatcttcatcatcaactaaactataaccagcatttgtaacattagtgttagttttaggtgctgtagtgcttgttgactttgcaacaggctgcgtattatttgtagtcgctgattgattagcacgagtgtcaccatttacttgtgcagtatcaactttttgacttacttgagcattgcctgttttgttatttgctgtttttggttggacaatagcagggtcttgatatacttgagtgccagaaatgttttgcgttggattttttacctcagcttttgcttgttcagtagttgctttaactttattactatctaaaacgtttttattagtagtttgatcttgtgtcgtctcagctgcttgaacttgatgtgcagtgactgctgaacctacaagcgttaatgcaaccattgatggtagtttgtaattgaattttttcgccattctatttattactcctaacatttattaattattactaacattatagtacctgttttatatacctgtgcgtatttaaccaatttgtaatatactcttaatttacattttcactgtaaaaaaatgaaaaaaattttgaatctcaatggtgacgtgacaaatcaaatagaattgatgtcaatttaagaattggtttattacaaatgtttctaaaatagatacaactttttttaattaagcgaggttaacttttttgtcatttcaatatgctcgatgccttcctcaagaaatatattacctctcattttaaagtttaaactttcataaaatgggatagcatgacattgggcattcatagtagctacgtaaaaaccttcatctttagctaatgattctacagcttgcataagcattctacccattccttgtccacgatgtgatttcatcacagctactcgttctattttgacagttgtttcattaatagggcgtattcgagcagtggcaactggctgtccattatcatatccaatgaggtgaatagattcagattcatattcatcaatttcactttcctcagggacgccttgttcttctacaaacactttctttcttatatagaagcaatcttctaacatcttttgattgtttacttttgaaaacataaaattcctccacatcctaacaaaatcatttacatttaatttactaataataacatagaataacgattgttattttcctcaaaaataattagacataaaaaagctataaagatgattgttgtgaatcatctttatagctaattaattattaatgttatagtgcttcttttctaataattgctgtatattgccaaaagattcgcatttgagcaatattccaattattcattcccattgtaaatcctgaaggcttaaatatattcacatcagttacttctaaagctgctgcaactaaatattgtaatggaatgctaagtgatttcattgtttcggtaatgccattttcatcatatacccatgaaaatggtaactctgattcgaaaacatcaacactattgaaaatttcaggtagggctaaaatataacatgcaccatctacaataggattgtcgatactatttttgtaataaattaggagtgcttcatagttttctcgatgctcatgattgacgtaaaaaaattcacttctaaaatgagccatatcttggctatgaatgatttgttgttctaacatattaaacatgccatttatatttgcaatcttttcgtatgtttttctactcatgtatgatgctcctttcataaatagtaaatgttaatcgtcatataatattaatttacaacaccattttggttatttgaagcttgtggcgcttgttgtgtgccaccttgattttgatttgagttttgatctgtagcaggttgttgttgattgctggaatcactgttattagttgaatcactgttctcgttagatgtcttatctttatctgtcgtatcattttgttcttttctcaataaactattatctaaaggcgttaatggtattaatgaaccataatgattaatgacacgttgatctaataaatcatttttatcattaataggtgataattctaagtctttacgaagtaagtttgcatatttttgaatgctttcaacacttggatgataatagtaaataccatttaacatatcatctttaccttttaattgcgcagttttaatttcaacatcatttgttaagtacatttttgctaaagctttaatttcagagttagttaaattatgctttgcatttttacctacaatttgaatcacgttatcaagtttatcaatagaatcaacttcctgtgctttttggaataaaatcttaattaattccatttgacgttgtccacgttttaagtctgaatcatgatgtctagttctagcaactgctaaagcctcatcaccatttaatttttggtacccttttttaattttaatcttaccagtatcatctgtgttaggttcatttaagtcgtatggcacatcatagtatatgccaccaagctcatttacagcctcgacaaatgctttcatattgactctcacataataatcaacaggtacattcatggtagcttctaccgaatccattgcggcaattggaccaccatatgcatgtgcatgggtaatcttatcgtaatagccaactttaggaatgtagctgatagtatcacgtggaatactaagcattctaatttgatgttttgattgattaaaagtagttaaaatcatagcgtctgatctagagtgttcagcatcctgtcctttttttcttcttccatcgttatcatcgatacctaagaaaagaatagagataggttgttcttcgggattgactttattatctcttaagttggattgacgattagcatttttgctgtcttgagaagattcgaatgcatcttgggacgttttaaaaagtaacgtagcgaagactattggaacaacaatgagaaccaatgctagaaggatcaaaaagtattttaaaaatttattcatgattgatgctcctatattaaatttttgttaaatcataatcataattttaaaatataattagttgaacgatatttatacaacttcattactaatacattatagccttaaattgtagtactttatagtaaaaaatacaaatgttatgtcaaagttccttgtaatttgaatgttttgttaaaatcaaaaagcatttttaaaaatataatgcgactttagtatgatgtcttaaaaaatttaaaggcgtaatataaattcgagtgatttatacaaagtgataaggtataattaattttgttgtatagataacatattagaaaaacttattactatgtagcgtaaagcataaatgaatgataagttaatttttgtaagttgtattattaggcatctaggttcaaatttttaacgatttaaatatataaaatgaatacattgtgaggcaattatcaaatgaaatttaataaagtaaaactagttattcatgcgtgtgtactattatttatcattatttctatagcgttaatttttcatcgattacagacgaagacacattctatagacccaatacataaggaaacaaaattatcagacaatgaaaaatatttagtggatcgtaataaggaaaaggttgcgccgtctaaactaaaagaggtatataatagcaaggatcctaaatataagaaaattgacaagtatttacaaagttcattatttaacggttcagtagctatatatgaaaatggcaaattgaaaatgagtaaaggttatggatatcaagattttgaaaaaggtattaaaaacacaccgaatacgatgtttttaataggttcagctcaaaaattttcaacagggttactgttaaaacagttagaagaagaacataaaataaatatcaatgatccagtaagtaaataccttccatggtttaaaacatctaagcctatcccattgaaagatttgatgttgcatcaaagtggattatataaatataaatcctcaaaagattataaaaacttagatcaagcagttaaagcgattcaaaaacgtggtattgatcctaagaaatacaaaaagcatatgtataacgatgggaattatttagtacttgcgaaagttattgaagaagttacaggtaaatcttatgctgagaattattatacaaaaataggagatcctttaaaacttcagcacacagcattttatgatgaacaaccttttaaaaaatatctagcaaaaggttatgcttataatagtacaggactttcattcttaagacctaatattttggaccaatactatggtgcaggtaatttatatatgacaccaacagatatgggtaaattaattactcaaatacaacaatataaattattcagtcctaaaataaccaatccattattacatgagtttggtacgaaacagtatccagatgaatatcgatatggtttctatgctaagccaacattgaatagacttaacgggggattctttggacaagtctttactgtttactataatgataagtatgtagttgtacttgcattaaatgtaaaaggaaacaatgaagttcgaatcaaacatatttataatgatattttaaaacaaaataaaccttacaatacgaagggtgttattgttcaataattaatatagaagatataacatgtatttggcattaaggcatcgaccttatctgaccagtatacgagttatatcttcttttttatagtggtaaaaagtttaaagtataaggttgaagaaggatgactttaaaaatatgtgttaactgataaaaggagaaaacatttgatgagttggcatcagactaaaataaatgaagacgaataccgttggtcatgcgtggtctgaatgttttctaaatctaactggaaatgataatttaataatgtacacttttgattgtttaaacatgtacaatttttaaaaacctagggataattttattgacgtgaacaacattgagattatctttagacataaatatggattttgaagttactatatttattagttgtggttgttaatgtattaattgaattgattataatgattgtcttataagatatagaaggggacttaaccatttaaaaattgaaggaaaataaaaaccagctaacaaaagtgttagctggttaaactttacattattaaaatgttgtttataagtgtgaagagtgaccgccttgcataacccaatatgttccgacaacgaaacaaagtgtaattacaagagcaaagataactttgaatgtttgtaaacgtccatctttaccttcagttaaatgcatgaacattaataattgaagtcctgcttggacgaatgcaaagccaaagataattgtcaacttcgcgtggaatgttaatgacgtgtatagtgttacgtaaactgctaaaagcgttaatacgatagatgcgataaatcctacagtatgtttcataattgtactcatccgctatacaccatccctatcatatatacggcagtaaagatgaaaacccaaacaacatctaagaagtgccagtataaacttactataaataattttggcgcattatatttgtctaatccgcgtcgttggatttggattaataaacaaatggcccaaacgatacctagcgatacgtgacaaccatgcgttcctaataggataaagaaactagaccagtaagaaccaattgttgggttaacgccttctgatgcatagtgtgcgaattcataaatttcgaatccaacaaagactaaacctaaaagtaacgtaatgatcatccaaaacatcattaacttttgtttttcttggcgcatgtagtaaatagcaataccacatgtgtaagaactgaataataatgcaaacgtcattattaaaacaagaggcaattcaaataactcagtagtcattttacctgcataatcgccaccatgttgcaaagttaatagtgtcgcaaatagggtaccgaataacgcaaattcggctgtaatgaaaatccaaaagccaagcttatttaattcgccttcatgtgtgcgtgaatcaatagtgtttgtatcatgactcatgacttacagcctccctttctttaatacgcgcttctcttaatctagcttcagtttcagcaacttcagcagcagggatatgatatccgtgatcgatttggaaactgcgataaatcatagtaccaaaaataccgaataaacaaattaatgctggaattacagtttcgaaaattaagaagaaaccgccgatagtcataaagataccaatccagaatccaacaggagtattgtttggcatatgaatgtctttgtaattatggttgtctaagtaatgacgaccatgttctttcatatcaacaaatgtgtcgtagtcattccaatctggtgtaatggcaaagttgtatttaggtggaattgctgatgcagtagtccactctagagtacgaccaaggccatcccagttatctccagttgcttcacgtggagatttgaagtgactgtatacgatactaacaacaaggaataagaatccgattgccattaataatgcaccgatagttgaaattaagtttaataagaaccaaccatctgatggcatataagtgtataaacgacgtggcataccatctaatccaagaatgaattgtggtaagaaacaaacgttaaatccgatcatgaagaaccagaagcaccatttgtttaatgtttcgtttaatttgtaacccatcatctttggataccagaagattaaaccagctaagcaggcaaatacaacaccagtaaccaatgtatagtggaagtgagctactaagaagtacgtattgtgatattgatagtcagctgatgccattgctaacattacacccgtaacaccacctaaaaggaagttagggataaatgctaatgagaatagcattggtgactcaaatgtaatacgtcctttatataatgttaataaccagttaaacaatttcacaccagttggaataccaatcagcattgttgaaattgagaagaatgagttgattaacgcaccattacccattgtgaagaaatggtgaacccaaactaagaaactaaggaacgcgataccggcagttgcccataccatactttgatgtccgaataaacgcttacgagcgaatgtcgggataatttctgagtaaataccaaatgctggaaggataacgatataaacttcagggtgcccccatacccagaagaagttagcccaaagcattggcataccgccatgtgcaactgtgaagaatgctgtgtcaaatattctatcagttgtcattaatgctaacgctactgttaaaggagggaaagcaagaataacaattaatgtagtaataaatgttgttactgtaaacattggcatttgcataaacttcatagttggtgttttacatcttaaaattgttacaaagaagttgatacctgtagctaaggtaccaagccctgaaatttgtatagctattaagtaatagttaacacccggaccaggactgaattcacctgctagtggcgcatagtttgtccaaccagctgctggtgaaccaccaataataaatgacaggttgaataaaatcatacctgcaaagaatagccagaaacttacgttgtttaatactgggaatgcaacatcacgtgctccaatttgtaatggaacaacgatattccataaaccaaagataaatggcattgccatgaagataatcatgattacaccatgtgtactaaaaatttcgttatagtggttagattctaaaaatttgttatcaggtactgttaattgcgcacgaataagtaacgcatcaataccaccacggacgaacattaatacggcacagattaaatacataataccgattttcttatggtctacagatgtgaaccattctttgtaaagatatttccataatttaaagtaagtaattactgcgattaaaccaataactaagaatggggcaccaatttgtgccattgtaatcatccagttacctttaactagtaattgatcccatggaaaattcattaatgtccacctccatgatcatcattgtcttgatcttgcgcatcttttgaaattttcttcatttctttcgcatttttcgattcatctttcttgaactcattgttatatggttcgtcatttccaagaatcatcaacttcataccatgtcgtttatagttcgcatttgtaatttgagctttacgagcaggtattaatggtttgtctgatacatctttaaacatattttcttcactagtgaagtttggatctttcaattcgaaattgaaacgtttatatgcatagaagatgtattctggatcggctgctggatcaacaaacgccatatgtgtaccattaaattctaaagctttattaggtgtgcttggtaataattgtttatcaaatgtatcttgatctaacgttttcttacctttaacttctttcacccatttgtcgtagtctttttgactaacggcatttactttaaatgtttgacgtgagaatccttcaccattgaagttagagttacgacctctgaacgtaccagtttgagatgcttctaacgtccaattcattgtcatgccagtcatggcatatttttgaccacctaattgtggaatccagaaacttgtcattgtatccatagcttgaagcttaaatacaacaggacgatctttagggattgttaatgtattaacagtctctatatgttcatctggataagcaaagaaccatttgtatcctgcacttactgcatatacaaccattggatctttctcactcttcggtggtttttcgtaatcgtataaagttttaactgtaggaatagctaaagcagcaacgattatgataggtattacaaaccatattgtttcaatgatggcattatggtgcatcttaccagattcggcattcttattataactatacttgtaaataaaaatggcgaacatgccaagtacaacgaaacaaataacaagcatgaagacgattgaataaagaatcaagaacttctgactacttgctactggcccttttgcgttgaaaatttctatatttgaacaaccactaagtaaaattagtgtgccaaataatagaagcaaagacttaaattttgacacttttttgacctcctaatactacaaatgtagggcttaacattaattttaagttattacacaatatttacaagggcttatgggaaaaaaattaataaaattgtatcaaaaatgttgataaatcaaggtgtgacgtgggttcacacatttgttaaaattatgtgtacattttgtgactaatagcgtttttgaaaaaattgcttcatatttaaaaggaaagttgagaatagctttcaattaaaggttaattgaatgaaaataaaaaaattttgaaattgtctaataaattgaaaatgatggctagttcattgaaaggaagcgcaaacattttaaaaaggaatttgccaaaagtaatttatcgttaaacaatgaaaagtggaaatttgtttgttcaaaatcaaaacatttttttaaaagagcagttaagttttaataatttgataggtagtcctttggtatacagaaaaaatacaatatttgggttaaagttgcagatgaagttggaataacaaataaaatggtagcaaaacatgttcgtttgctaccattttatttgcagtatagtgatgagggctatttaacctcaatatacctagtggaaattttaattgcaccatctgaatcagtgacatgatatttaatttgatatttaccagatttagatgtatcaatttggccatcgactttaattttatcggttaaatctccatcttctttatcaaatgcacttatgccgtttagaaggttataatcttgacctttcttaataacgatatcattagcgcctttaatttgtggtgtagtattcgtcgttgcatctgcatttaaatttggtgttactagtgtagcagaaacaccgagggctgataatgactgtaatagtttattcataatgtaacctccgaatgataagtcatttctgagttagctttactataccttaatttatattatttacacatcatactatagtcctaatcttaccctataaagaatgaaatttaaatataaatttataaataatgaggaaataattattattttgaaaatctgccacaattgtaaaattaataattctgggataatttgaaatcaaatataactttattcgacagtttgaacttaaatttttgtgaatcaaaacaataagaaaagggaggcgaaaatgataaagaaccactaatgattaattatgtagtagtactttatcatagtcacagcttctgtgttggggcccatccccaacttgcacattattgtaagctgacttttcgtcagcttctgtgttggggcccacaccccaactcacattgcctgtagaatttcttttcgaaattctctgtgttggggcccctgactagaattgaaaacttgttacaagcttattttcattcaattaactactgtctatataaaattgttgagccaagaacaaagtgaaatgctcccttcaaagacttcatttattcaatgtctactttgaagggagcatttgattgattaatgtcccagattcttcttattattcattgcaattgcaaaataatatttaatgtgggttaaaagagttcattaaaactcatttattaattcacattacataactaatgtaaatttacgaatcaatacctcgacgcattttttctgcaagcaaagtattatttaataccatagtaattgttaatggaccaacgccaccaggaactggtgtaatagctccagcaatttctttaaccgcatcataatcaacgtcaccttttaatttgccattttcatctggcgtattgccaacatcgataattactgctccttctttgaccacatcttttgttactaaaccaggcttaccaactgcactgacaatgacatcagcatcctttaaatatgatgccatatcttttgaacgagaatgtaagattgttactgatgcatttttttgaagtagtaacttagaaactggttgtccgacaatatgacttcgtccaattacaactgcatttttaccttctaaatcaatatcagcatgttttaatatttccatgatgccgagcggtgtgcaaggtacaaaagtttgttcatcgatatataatttccctatatttattggatgaaaaccgtccacatctttttcaggattgattgcttctaatattttctgttcgctaacttgttttggtaatggtacttgtaccaaaataccacttacagaatcatcattatttagtctatttagttcgtttaatacttcttcttcagtagctgtttcttccaaatgtacgatttctgaaatcataccaattttttcagctgctttcttttttgatctaacataactttgactagcgccatcattaccaactaatataacggataatttaggtgtaaaacccttttcttttagcgcttcaacttgatcttgtaacccctgtctgtagtctttggcaatttgtttaccatctaaaattttagcaaccataaaaacttctcctcctattgtcaatatcctaactttgttagttcataaaactaatttacatagcaaaagacgtaaattcaaacaaaaaataaaaataaagttcgatttttgattgaaaaagcagaaattgcttgttatgctatatctataatatacaactaaagtaattcacaattcaaacttttgaaagggtgtacaaagtgaaagtagcagtcattatgggcagttcttccgattggaaaattatgcaagagagttgtaacatgttggattattttgaaattccgtacgaaaaacaagtagtatccgcacatcgtacgccaaaaatgatggttcaatttgcttctgaagcgagagaaagaggtataaacattatcattgcaggcgctggcggtgcggcacatttaccaggtatggttgcatcattaacgacgctaccagttattggagtgccgattgaaacaaaaagtttaaagggtatagattctttattatcaattgttcaaatgccaggaggtattccggttgcaacgactgcaattggtgcagcaggtgctaaaaacgcaggtatacttgcagcaagaatgttaagtattcaaaatccttctttagttgaaaaactaaatcagtatgaatcttcgttaattcaaaaagtggaggacatgcaaaatgaacttcaataaattaaagtttggtgcgactattggcattattggtggtggtcagcttggaaagatgatggcacaatcagctcaaaaaatgggttataaagtggttgtattggatccttctgaagattgtccatgtagatacgttgcacacgaatttatacaagccaagtatgacgatgaaaaggcactcaatcaattaggacaaaaatgtgatgtgattacttatgaatttgaaaacatttcagcccaacaattaaaactattatgtgaaaagtacaatattccgcaaggttaccaagctatacagttattacaagatcgcttaactgaaaaagaaacattaaaaagtgctggtaccaaagttgtcccgttcatttcagtaaaagaatctacagatattgacaaagcaattgaaacattaggatatccttttattgtaaaaactagatttggtggctacgatggcaaaggtcaagttttaattaacaacgaaaaagacttacaagaaggttttaaattaattgaaactagtgaatgcgtagctgaaaaatatttgaatatcaagaaagaagtatctcttactgttacaagaggaaacaacaatcaaatcacttttttcccattacaagaaaatgagcatagaaatcaaatacttttcaaaacaattgttccagcgagaatagataaaacagctgaggcgaaagagcaagttaataaaattatccaatcgattcatttcattggaacatttacagttgaattttttatagatagtaacaaccaattgtatgtgaacgagatagcaccaaggcctcacaattccggacattattcaattgaagcatgtgattattcacaatttgatactcatattttagcagttaccggacaatcattaccaaattcaattgaattattaaagccagcagtcatgatgaacttactaggtaaagatttagatttattggaaaatgaatttaatgaacatccagagtggcacttacatatttatggtaagtctgagcgtaaagatagcagaaaaatggggcatatgactgtactaacgaatgatgtaaaccaaactgaacaagatatgtacgctaaatttgaggggagtaattaaagcatgacattattatatgaaggaaaagcgaagcgcattttctcaacaaatcaagaaaatgaattaagagttgaatataaagatgaagttactgctggaaacggggctaagaaagacacaatggcaggtaaggggcgattaaataatcaaattacttctattatatttaaatatttacaagaaaatggaatagaaagtcactttattaaacaattatctgaaacagaacaattagttaagcctgtgaaaataattccattagaagtagttgttcgtaatattgctagtggatctattacaaagcgtttaggttttgaaaatggtgaagtttttagagaaccacttgtagaatttttctataaaaatgatgcgttaaatgatccgttgataacggatgaccatgttaaattgctcaatatagcatcagatgaagatattgaaatactaaaatccaaagcattaaagattaataatgtgttgaaacaattaatggatgctatgaatttaaaattagtagattttaaaatcgaatttggaaagactgagactggtcaaattttgttagcggatgaaatatctccagatacatgtcgaatttgggataaagctaccaatgcaaactttgataaagatgtatatagaaataacactggatcactgattgaaacatatcaaatatttttaaacaaattggaggatttaaaataatgaaaacaattgaactacatatcacattacaaccacaagtattagatacgcaaggacaaacgcttactcgagctgtacatgacttaggttatgcacaagtgaatgatattcgtgtaggaaaagtattatatatgacagtggatgaggttagtgatgaaaaggtacacaacattattacaactctaagtgaaaaattgtttgcaaatacagtgattgaagaatatagctataaagtgttagatgatgaaaaggagaatgcataaaatgaaatttgcggttcttgtttttccaggttcgaattgtgatagagacatgtttaatgctgctattaaaagtggtgttgaagcggaatatgtagattatagagaaacatcactaagtggatttgatggcgtacttattcctggtggattttcattcggggattacttaagatctggggcaatggctagtgtagcgccgattatttcggaagttaaacgtcttgcagctgaaggtaagccagtattaggtgtttgtaatgggtttcaaattttaactgaaataggcttattacctggtgcattattgcataacgattcacatttatttattagtagaaatgaagagttagaaataatgaataatcaaacggcatttacaaatctttatgaacaaggtgaaaaagttatatatcctgtagctcacggtgaaggtcattattattgtactgatgaaatatatcaacaattaaaagctaacaatcaaattattctgaaatatgtgaataatccgaacggttcatatgatgatattgcaggaattgttaacgaaaaaggcaatgtatgtggcatgatgccacatcctgaaagagctttagaaacgttgttaggtactgatagtggtgtgaaattatttgaagcgatggtaaaaagttggagggaacaacatgtctaaatttatcgaaccaagcgttgaagaaattaaacttgaaaaagtatatcaagatatgggattaagtgatcaagaatatgaaaaagtttgcgatattttaggcagacaacctaactttacagaaacaggtatcttttctgttatgtggagtgaacattgctcttataaacattctaaaccgtttttaaagcaatttcctacgtcaggtgaccatgtgcttatggggcctggtgaaggtgcaggggtagtcgatataggtgataatcaagccgtagtatttaaagtagagtctcacaatcatccatcagcaattgaaccatatcaaggggctgctacaggcgttggtggaatcattcgtgacattgtctctattggggctagacctattaatttgttaaacagtcttagatttggagaattagataataaacaaaaccaaagattacttaaaggtgttgtaaagggtatcggaggttatggtaactgcattggtattccaacaactgctggtgaaatcgaatttgatgaacgttatgatggcaatccacttgttaatgcaatgtgtgttggtgttatcaatcacgacatgattcaaaaaggcacagcaaaaggtgtaggtaattcggtcatttatgttggtttgaaaactggtcgagatggtattcatggtgctacttttgcatctgaagaattgacggaagaaagcgaaagtaaacgaccttctgtacaaatcggtgatccatttgtaggtaaaaaattaatggaagcaacacttgaagcaattacatttgatgaattagttggtattcaagatatgggtgctgctggtttaacatcttcatcgtctgaaatggcggcaaaaggtggtagtgggttacatttgagattagaacaagtgccaacacgtgagccaggtatttctccttatgaaatgatgctttcagaaactcaagaacgtatgttactagttgttgaaaaaggtactgaacaaaaattcttagatttatttgataagcacgaattggatagtgctgttataggtgaagttacagatacaaatcgttttgttttaacatatgatgacgaagtttatgctgacattccagttgaaccactagctgatgaagcacctgtatatattttagaaggagaagaaaaagattataatacttctaaaaatgattatacacacatcgatgttaaagatactttctttaaattacttaagcatccgactatagcatctaaacactatttatatgatcaatacgaccaacaagttggtgccaatacgataattaagccaggacttcaagcatcggtagtacgtgtggaaggcacaaataaggcaattgcttcaacaattgatggtgaagcgcgttatgtatataacaatccatatgaaggtggaaagatggtagtagctgaagcttatcgaaatttaattgccgtgggtgcaacaccattagcaatgacagattgtttaaattatggttctcctgaaaagaaagaaatctatcaacagttgatagattcaacgaaaggtatggcagaagcatgcgacattcttaagacaccagtagtttctggtaatgtatctttatataacgaaacgaaaggtacttctattttcccaacaccagttgttggaatggtaggtttgattgaaaatgtaaattatttaaatgattttgaacctcaagttggagataaattatatttaatcggtgatactaaggacgactttggtggtagtcaacttgaaaagttaatttatggcaaagttaatcatgaatttgagtcattagatttgagttcagaagttgaaaaaggtgaatcaatcaagaccgctattcgtgaaggactattatcacatgttcaaacagttggtaaaggtggcttactgattaccttagctaaactaagtgcgcattacggtttaggattaaaatcttcaatagatataacaaatgcacaattgtttagtgagacgcaaggccgatatgttgtttctgttaaatcaggtaaaactttaaatattgataatgcaatagaaattggacttttaacagatagtgataatttcaaggtaacaacaccatatacagagattagtgaaaatgtttcagatattaaacaaatatgggaaggggcaattgctcaatgtttaactactcaggattaaacgaagaatgtggcgtgtttggtatttggaatcatcctgaagcagcgcaactaacatatatgggacttcatagtttgcaacatcgtggtcaagaaggtgcaggtatagttgtttctgatcaaaatgaattaaaaggcgagcgaggattaggcttactaactgaagcgattaaagatgatcaaatggaacgattaaaaggatatcaacatgcaattggtcacgtccgttatgctacttcaggtaataaaggtattgaaaatattcaaccgtttctgtatcacttttatgatatgagtgtaggtatttgtcataatggtaacctcattaatgctaaatcattgcgtcagaatttagaaaaacaaggtgctatcttccattcgtcttctgatactgaagtcattatgcatttgatacgtcgaagtaaagctcctacttttgaggaagcgttgaaagaaagtttgcgaaaagttaaaggcggttttacatttgcgattttaactaaagatgcgttatatggcgcagtagatccaaatgctatcagaccacttgttgtaggtaaaatgaaagatgggacatacatccttgcaagtgaaacatgtgcaatagatgtgttaggtgcagaatttgttcaagatattcatgcaggtgaatatgtcgtgattaacgataaaggtattacagttaaatcttatacacatcatacgacaactgcaatttctgcgatggaatatatttattttgctagaccagactcaacaatagctggtaaaaatgtccatgcagtacgtaaagcttctggtaaaaaattagcccaagaaagccctgtaaatgctgatatggtcatcggtgtacccaattcatcgctatcagctgcgagtggttatgctgaagaaataggtttgccatatgaaatgggactagttaaaaatcaatatgttgcaagaacatttattcaaccaactcaagaattacgtgagcaaggtgtgagagtgaagttatctgcggtaaaagatatagtagatgggaaaaatatcattcttattgatgattccattgttcgcggtacgacaattcgacgcattgtgaaaatgttaaaagattctggtgcaaataaagtacatgtgcgtatagcatcaccggaatttatgttcccaagtttttatggaatcgatgtttcaactacggcagaattaatttctgcaagcaaatcacctgaagaaattaaagattatattggcgctgattcattagcatatctatctgtagatgggttaattgaatcaattggtttagattatgacgcgccatatagtggcttatgtgtagaaagtttcactggagattatcctgcagggttatatgattatgaagcaaattataaagcgcgtttaagtcatcgacaaaagcaatatatttctaaaaacaaacacttttttgatagcgagggaaatttaaatgtctaaagcatatgaacaatctggtgtaaatattcatgctggttatgaagctgtagaaagaatgtctagtcatgttaaacgtacgatgcgtaaagaagttatcggtggtttaggtggattcggtgctacatttgatttatcacaattaaatatgacagcaccagttttagtttctggaacagacggagtaggtacgaaattaaaactagctatcgactatgggaaacatgattcgataggtatcgatgcagtcgcaatgtgtgttaatgatattttaacgacaggtgcagaaccattgtattttttagattacatcgctacaaataaagttgttcctgaagttattgaacaaattgttaaaggtattagtgatgcatgcgttgaaacgaatactgcacttatcggtggagagactgctgaaatgggtgaaatgtatcacgaaggtgaatatgatgtagccggatttgcagttggagcagttgaaaaggatgactatgtagatggttcagaagtgaaagagggacaagttgttatagggcttgcgtcaagtggcattcattcaaatggatatagtttagtgcgcaaattaattaatgaatcaggcattgatttggcatcaaacttcgataatcgtccatttatagatgtctttttagaaccaactaaattatatgtcaaacctgtacttgctttaaaaaaagaagtttctattaaggcaatgaatcatattactggtggaggcttttatgaaaatattccacgtgcattgccagccggatatgctgctagaattgatactacatcatttccaacgccaaaaatatttgattggttacaacaacaaggcaatatagacacaaatgaaatgtataacatttttaacatgggtattggctatacggttatcgttgatgaaaaagatgcatcacgcgctttgaagattttagcagaacaaaatgtggaagcctatcaaattggtcatattgtgaaaaatgagtcaactgcaattgaattgttgggggtataacaatggttaaaattgcgatttttgcatcaggttcaggaagtaactttgaaaatatagttgagcatgttgaatcaggaaaacttgaaaatattgaagttacggcgctatatacggatcatcaaaatgcgttttgtatagatagagcaaaaaagcacgatattcctgtttatattaatgaaccaaaacaatttgattcaaaagcagcgtatgaacaacatttagtaacactattaaataaagataaggtagagtggattattttagctggctacatgcgtctaataggtccagacttattagcatcatttgaaggtaaaatattgaatatacatccatctctattgccgaaatataaggggattgacgcaataggccaagcatatcatagtggcgatactattactggttcgacagtacattatgttgatagtggtatggatacgggagaaattattgaacagagacaatgtgatattagaccggacgattcaaaagaacaattagaagagaaagtaaaaaaattggaatatgaattatatccaagtgttattgctaaaattgtaaaataaggagtatgtatgtgatgaagaaagctattttgagcgtatcaaataaaacaggtattgtagagtttgctaaagcgttaacgcaattaaattatgaattatattcaacaggtggtactaaacgtatattagatgaagcaaatgtaccagttcgttctgtttcagacttaacacattttccagaaataatggatggccgtgttaaaacattacatccggctgttcatggtggcattttagctgatcgaaataaaccgcaacatttaaatgaattatcagaacaacatatagatttaattgatatggtagtagttaatttatatccattccaacaaactgttgcaaaccctgatgtaacgatggacgaagcaattgaaaatattgatattggtggtccaacaatgttacgtgctgcagctaaaaactataaacatgtaacaacaattgtacatcctgcagattatcaagaagtattgacgcgattaagaaacgattcgttagatgagtcatatagacagtcattaatgatcaaagtttttgagcatactgcagaatatgatgaagcgattgtacgtttctttaaaggggataaagaaactttaagatatggagaaaatccacaacaatcagcgtattttgtgagaacttcgaatgctaagcacacgattgcaggcgctaaacaattacatgggaaacaattaagctataacaatattaaagatgcagatgctacactagctttagttaaaaagtttgatacacctgctgcagttgcggttaaacacatgaatccatgtggtgttggtatcggtgacacgatagaacaagcatttcaacatgcgtatgaagcggatagtcaatcaatatttggtggaattgttgcattaaaccgagctgtaacacctgagttagcagagcaattgcatagtatctttttggaagtcattattgcaccaaaatttacagatgaagcattagatattttaaaacaaaagaagaatgtaagattattagaaattgatatgactatagacagtaacgaagaagagtttgtttcagtatctggcggatatttagttcaagaaaaagacaattatgtcgtgccaaaagaagaaatgaaagttgttacagaagtagcacctactgatgaacaatgggaagcaatgttattaggatggaaagttgtaccatcagtaaaaagtaatgcaattattttaagtaataataaacaaactgtaggtataggtgctggacaaatgaatcgtgtcggtgctgctaaaattgcgttagagagagctattgaaatcaatgatcatgtagcgttagtatctgatggatttttccctatgggagatacagttgaacttgcagcacaacatggtataaaggcaattatccaaccgggtggttcgattaaagatcaagattcaattgatatggctaataaacatggtattgcaatggtagtcacaggcactcgacattttaaacactaattttaaaggggcgtaacataaatgaatgtattagtaattggtgctggtggacgagaacatgcacttgcatataaacttaatcaatcgaatctagttaaacaagtgtttgccattccaggtaatgaggcaatgacacctatagctgaagtacacactgaaatttcagaatctgatcatcaagcgatattagattttgctaaacggcaaaatgttgattgggtagttataggtccagaacagccgctaattgatggattagcagacattttacgagcgaatggtttcaaagtgtttggtccaaataagcaagcagctcaaatcgaaggctcaaaattatttgctaaaaagataatggaaaaatataatattccaactgctgattataaagaagttgagcgaaaaaaggatgctttaacacatattgaaaactgtgaattgcccgttgttgtcaagaaagatgggttagctgctgggaaaggcgttattattgcagatactattgaagcagccagaagtgctattgagattatgtatggtgatgaagaagaaggtactgttgtatttgaaacgtttttagaaggtgaagagttctcgctaatgacatttgttaatggtgatttagcagttcctttcgactgtattgcacaagatcataaacgcgcatttgaccatgatgaaggaccaaatactggtggtatgggggcttattgtccagtaccacatattagtgacgatgttttaaaacttacaaatgaaacaattgcacaacccattgcaaaggcaatgcttaatgaaggttatcaattcttcggtgtattatacattggtgctattttaactaaagatggtccaaaagtaatagaatttaatgcccgttttggtgatcctgaagctcaagtattattaagtcgcatggaaagtgatttaatgcagcatattattgatttagatgaaggaaaacgtactgaattcaaatggaaaaatgaatctattgtaggggtcatgttggcatcaaaaggatatcctgatgcatatgaaaaagggcataaagtaagtggctttgatttaaatgaaaactattttgttagtggattaaagaagcaaggtgatacctttgttacttcaggtggtagagttatacttgccatcggaaaaggtgacaatgtacaagatgcacagcgagacgcatacgaaaaagtatcacaaatacaaagtgaccatttattctatcgtcatgacattgcgaataaagcactacaacttaaataagtaaatttaaaatactaagattagctatgaacgaatctataacgatagattttttcatagcttttttagttgtagagtctaggacattgatttctgtaccaaatttgtgattatgcatatgtaatacaaaacaggcgccacaacatgtttggatgaacaaaataacatgtttgtggcacctcttttgtttagtatggaataaatggttttctttttctatacaatgaatttctaatttagtatctatacaattatggataaaatttaacctacacgaccaagacgaacatcatctatgcccgtgatgggtaaggtgattgaacaataatatgccaaagtaataatggcaattaaaactataataaagattatatctttatatgagaaaggtacgttgtaatagtaagtacgaggaccatctctaaatcctttcgactccatcgcaactgataattgatgtgcctttctaatattttgacttaatagaggtataattaaatgcttaaatcgctttaaccctctataatttgccgcgtctatcatctgatagcgcatttttaaagatctgcgaagctgtattaaagaactaatcattaaaggtatcatacgaatggcagccatgaatgcataagcaacttttgatttaacctttaaatgttgcattaaactataaaatatcatgacaacctgagatgtaagtgcgattaagataccgaaaaatgaaatagcaatggttcttaatgatacatgtaaaccacgaactaaactttctgttgtaatatggataaatccgaatttcaaaattgtatggctaccattcccgtataaaatcatgaacagggaagagagtaatgcaaagccaatacttatagttataaaaattgctgtaattttaaactgagtaccattaaacatcaataagaaaactaacattaagatagtgatataaagcataaaatcgaaattatgcacaaatataataaagaaaaatagtataattccaagaaatagtttcgttataatgttgacatcatcaacaaatgatcgctgaactttccattgctcatacattcgtatcaccatcacaatctagtaacgcaccatctgaaattttaagtcttcttgatggataacgttcaattatttcatcgtcatgtgtaaccatgacaatactttgtcccaaattaattcgcttttggaaaagtttgatcaactggaatgtattatggctatcaagtccaaatgtcggttcatctaaaaagataatatcagctttagaacttagtgcggtagctacgctaaggcgtcgtttttgaccaatagacaactcataaggatgttgatcttttacattttgtaaatctaaaagttttaaaagttgtatcgtttcatcatcactttgatctttagaaaggtgattaaaatgaatgttaatttcatcataaaccgaatttgttataaattgtaattctgggttttgataaactagatacatgtgttttgctgcatgtttaatttttgttaaacgctgattttcaaaataaacatcaccttgatatttaatcaattgcataattgattcaagcaaggttgttttaccactaccatttgcccctgtaattgtaatccactcacctagaccaatttctaaatctgagaatgagagcaaggttgatttaccgcgaataatacgtccatttttaaattgtaataagtgtgagtttgttgttggaaagtcaacacgacttggtgcgaattcccatgcacgtggatgccacacaccatattcactgagtaaatgaacatacttctgtaatatgatttcaggacattcatcggcaatgatatttccgttataatccatcaaaatgacgcggtcgacatgattccagatgtgtttaactttatgttcaacgattacaacagtttgatcttcccaaagttcaattagtttagtccataaatcttctgttgcttgaacatctaacattgctgtcggttcatctaaaaacaatgtttttgattgttgaagaatggtttcaacaattgccaatttctgtttcatcccgccacttaaatctttgatatacgtttcaggggtaacatttaaattgaccatatttaaagcattgataattaacgcatccatgtcttcacgtggtacttgtctattttctaaaacgaatgcaagttcttcgtatacttttggcatacaaaactggctatcagggtcttggaaaataacgccacttaatgggtcaacgattagttcatcatatttcataggtaattcaattaaattaggaacaataccacttaatacattcagaagtgtacttttaccgcaaccagaaggaccgagtaaaagtactttttctttgtcttgaatagtgatatttaaatgatcgaaaattttacgttgaccacttggatattttaatcgtaaatcacttacttttaacactctgaatgctcctcttataagttgtcgtaatcttctttagcagctggtctaaataattttgttacgcctgtcttatctaaagcttttactaaaaggtaagataggacgccggcgactactgcaccactaattaatctaaatacgatgaataatgttaagttccaacctgcaacttcatttaaataaccatagaaataatctatagggaaagccgcgattgctgtacaaaaacctgctaacatagctaccataactgaacgagattgatatttaaaaattgcaaagacaagttcacacgctaaaccttgtatgaaagcgtaaacgattgtcggaatatcgaaacgacccataatgatagtttcgccggcacctgcagcaaattcagccagtaaagcaatacctggttttggaataattagatagcagacaatcgctgccatgaaccaaaccccgtttgttaattgttcgaggtgaaggcctgtagcttgcacaccattgtaaacaaaccaccataaattgtaaataactgcgaatactactgaaataagtacggttactagtatttcagatagctttaaaccttttgacatttttacatcctcctaataaaaaaacgcacaaccatccataggaaagttatgcgttcacaatatatattagtaaaacatatgtatagtaacactttcctacgctagttcaagctagatcaggttcaaagggtttgagggcaagcctcatctcagtataaaacacccctagtgtgtgcgatttatttaattaattatactgtaagacgtttgtaaacttatgtcaataggttgtcttcatgaaatttcgtttaattcgatttaaaatttataatattagcattggatttaaattgaagatgtagtaggaatgttagtaattaaagatataaaaatatgtgacatgtaataagattgagctgataaatgaagagggatacttatcaatcatacctctttaacaacagtgaagaacccgtgcataatggcttacgaattatagtttgtagggtaaaagagggatacatgcaccgagcacatgcataaaatcccctaacaactaaaagttgtaaggggatttaaattaatttagtgtatcttggatatcttgttttgtttgattaatatcttctgttttttcttcttttttatcttttaatttttcttcaacttctttagctttttctgctgcttttttattttgattttcattagacatgattaattcctcccaaattggataattatttatatataaatcttacccggttgtactttcgttaaacttttctaagtctatagcactatttattcatttatctaaagacaacaacattagattaatatataatgattttgaggtgaacataatgtcttttcttaggaaacacgccgaaattatttttagctatttaatcggtatcgtttcactcttcactggtctcattattttaattaacttgccattaattaaacaattaaatggtggtaaaaaagttgatacacatgttcataatgtgtgggaatttctgaatgcatttttcagtgaaattattaaagtaatgagtcgatttataggtaatttccctatagttagtgcaattgtgataattatattcggtattttagttatgttgattggtcatacattacttagaactattaagtatgactatgatatttctatctttttcttagttatcggtatcatgtactttattattactcttatattaatgactcaagtttatggattctttgcagtgattttcattattccatttacaattcatataggatatatcgtctataaagatgaattgaatcaggaaaatgtaaaaaatcatttcatgtggataattgtgagttatggtataagttacttaattacacaaattgcattgtatggcagaattgatgctaatgaaatagagtcaattgatatcttaagtgtcaatgctttctttataattatgtggttacttggtcaaatggctatttggaatttcttgttcttgcgccgagctttacctttaacaaagcaagaattaggtgaagaggagccagaattatcaagaacaagtaaagggaatgtcacgaatcaaactaaaattcacttgaaacaactccaagataagactacagaatatgcacgtaagacaagaagaagtgtcgatttagataaaattagagctaaaagagataaattcaaaaagaaagttaatgatattatcgatattcaagaagacgatattcctgattggatgagaaaaccgaaatgggttaaaccaatgtatgtcgaactattttgtggtgtcgtcatctttttattcacatttttagaatttaataatcgtaatgcattatttgtatctggtgattggaaattatcacagacacaatatgttattgaatgggttacattattaattctgttattcattattatcgcatatatcgctacaacgttaactttccacttgaaaggtaagttttattatttacaactatttatggggagcattttattctttaaattgttaacggaatttataaatataatgattcatggactattactttcagtgttcattacgccaacattactattaatgttattggcaatcatcatttcttattcgttacaattacgagagcgaccataattaaaagcattataaaagtacaatctattaaacattttgatgtgtacgctataagttagatatatctctaacttatttagatacaggtcaatgaagtttatggatagtactttttttgtaactagatttgattgattcaggtgatgtgaattaagtattgaaaattgtatacaaagttttagtgcaaataaaatagttgaaaagttatccatttgtaaaatcaagaaaactagtaaatagttgaagcgacatatggaatttgcgaaacgatatatagtgtttcctttgtagaaatttaacatatatcattcgaattactaatttgttaaaatcaacagtaagattagaagtagatgatattgaaatttggcaaacaatttaatctatataaaactacaacgaaacacagaaaggaagttgtcagatgaaaatagcaactctgaacaaaggcaaagaaacaaaatattttaatggatatcctttaattgaagaagaggatatctattcacaagatcatttaaaagaaggagatatttttcaaattgtgactgataaatcacaatatgttgcaacggcttatgttggtcgccaacataaaggattaggttgggttctaacatacgataaagctcaagaaatcaacacagctttctttgtgaaattgtttaatactgcattagcagaacgtgattattattttaatatagatggaacaaatgcttttagattatttaatgctgaaggtgatggtgttgggggattaacaatcgacaattacgatggtcatttgttgattcaatggtactcaaaaggtatttataaatttaaatatgccattcttgaagcggttagaaaagtatttgattataaatctatttacgaaaaagtaagatttaaagacagcgaatatagtggtggttttgttgaaggagatgcacctgagtttccaattgttatcgaagagaacttcacattttataatgtagaccttgaagatggtttgatgacaggtatctttttagatcaaaaagaagtgcgcaagaaattaagggatcaatatgccaaagaacgccatgttttaaacttatttagttatacaggtgctttttctgtaatagcagcaagtgaggcatcttcaacaacaagtgtagatttggctaatcgttctcgtagtttaactgaagaaaattttggattaaatgctattgatcctaaatcccaatatatttatgtcatggacacttttgatttctataaatatgctgcacgacatggacatagttatgacacgatcgtgattgatccacctagctttgcgcgtaacaaaaaacgtacattttcagtgcaaaaagattatgacaaattaattaatggcgccttaaatatcttatcatctgaaggaacattattgttatgtacaaacgcaagtgtatatccattaaagcaatttaaaaatactattaaaaagacgcttgaagagagtggcgttgattatgaattaactgaagttatgggattaccaaaagattttaaaacgcatccacattataagccatctaaatatttaaaagctgtttttgtaaatattagacattaatttgataaaaaggggtatagtaacttattgagaaaaagaagggtgataatattatgggattcaaaaacaatttaacatcaaatttaacaaataaaattggtaattcagtctttaaaatagaaaatgttgacggaaaaggtgcaatgccaacgacgattcaagaattgagagaaagacgacaacgtgctgaagcaattgtaaagagaaaatctttaatgtcatcaacaatgagcgttgttccaattccgggtttagattttggtgttgatttaaaattaatgaaagatattatcgaagatgtaaataaaatatacggattagatcataagcaagttaatagccttggggatgatgtgaaagaaagaattatgtctgcagcagcaattcaaggtagtcaatttattggtaaaagaatttcaagtgcatttttaaaaatagttattagagatgtagctaaacgtactgctgcaaaacaaacaaaatggtttcctgttgtaggacaagctgtgtctgcatctattagttactattttatgaataaaattggaaaagatcacattcaaaaatgcgaaaatgttattaaaaatgtcatgtaggtgctataatagttttgcaatttgcaaattttactgaaaccggttttaaacgaattgaatttaaagcatggttttggtaaagttaatgtataaaactaagttagtattgtaataatattgaagattctaactatacgaaggagaaatgtaattatggaacaaaattcatatgtaatcatcgacgagactggtattcacgctagaccagcaacaatgttagtacaaacagcttcaaaattcgattctgatattcaattagaatataacggtaagaaagtaaacttaaaatcaatcatgggtgttatgagccttggtgttggtaaagatgctgaaattacaatttatgctgacggtagtgatgaatctgacgccattcaagcaatcagtgacgtcttatcaaaagaaggattgactaaataatcatgtctaaattaattaaaggtattgccgcatctgatggtgtcgcaattgctaaagcttatttattagttgagccagacttaacattcgacaaaaatgaaaaagtcactgatgttgaaggagaagttgcaaagttcaatagcgctatcgaagcttctaaagttgagttaactaaaattagaaataatgcagaggttcaactaggtgctgataaagctgctatctttgatgcacatttattagttttagatgaccctgaattaattcaaccaatccaagataagattaaaaatgaaaacgctaatgctgctacagcattaacggatgtaacaacacaatttgttacaatttttgaatctatggataacgaatacatgaaagaacgtgcggctgatattcgcgacgtttctaaacgtgtgttatcacatattttaggtgtagaattaccgaatccgagtatgattgatgaaagcgttgttattgtagggaatgacttaacgccatctgatactgctcaattaaataaagaattcgtacaaggttttgctacaaacattggcggaagaacaagtcactctgcaattatgagtcgttctttagaaattccagcaattgttggtacaaaatcaattactcaagaagttaaacaaggcgacatgattatcgtagatggattaaatggtgatgtaatcgttaatccaactgaagatgagttaatcgcttatcaagataaacgtgagcgttattttgctgacaagaaagaattacaaaaactacgtgatgctgatactgttacagttgatggtgttcacgcagagcttgctgcaaatattggtacacctaatgatttgccaggtgttattgaaaatggtgcacaaggtatcggcttatatagaactgagtttttatatatgggtcgtgaccaaatgcctacagaagaagaacaatttgaagcttataaagaagtattagaagcaatggacggtaaacgtgttgttgtacgtactttagatataggtggagataaagaattatcatacttaaacttgcctgaagaaatgaatccattcttaggttaccgtgcgattcgtttatgccttgcgcaacaagatattttcagaccacagctacgtgcattattacgtgcatcagtttatggtaagttaaatatcatgttcccaatggttgcaacaattaacgaatttagagaagctaaagctatattattagaagaaaaagaaaaccttaaaaatgaaggtcatgacatttcggatgatatagaattaggaatcatggtagagatacctgcaacagcagcattagctgatgtctttgctaaagaagtagatttcttcagtatcggtacaaatgatttaattcaatacacattagctgctgaccgtatgtcagagcgtgtatcatatctataccaaccatataacccttcaatcttacgtttagttaaacaagttattgaagcgtcacataaagaaggtaaatggacaggtatgtgtggtgaaatggctggagatgaaacagctattccattattgcttggtttaggtttagatgagttctctatgagtgcaacgtctattctgaaagcaagaagacaaattaatggtttaagtaaaaatgaaatgactgaacttgctaaccgtgcagtcgactgtgcaacgcaagaagaagttattgaattagttaacaactacgtaaaataattaattctttcgaaagacagaattataaataaacccgaagtattcattgtgagtaattatgaatacttcgggttcttttttatgatttatgttaatttcaatggaatgttgttgctaactaattaaacaactatgtgtcattaacaaaatgttgttctttaattaatgttagttaatttaaaaatcgatatttaatttatgatagctataaatgatgaagttgatttagatgaaaattaatcttggatatttaatactttgttgatttcatcaagatcaacatggtacattggattgccattcaacaaaataaacggagttgaaaaagcatcaaaatctatcatttcgtttcgatattgttgattgttgatatttctctcttcaaaatcaatgtgatgctcatttagataattttttacaaatgtacaaggtggacaatcattctgcgtataaacgattatttctgacatgtatcatgctccttcgtgctttattctaatgtaatatacacaattatacattgaaattcaaatttgtgaacacattgtgaactgacataaattatacacaatttcatagcgcataatgttttaaaaatacacattatagcaattataattaagttcattgtgttgtcatcaaaaaaagaaaaaggtgatgtttttaaatggatacagttgaaatcagtcggtttttgacagctatgactttagcagttcatatcatttttgcaacgattggtgttggtatgcctttaatgttcgcaattgcagaatttttaggtattcgcaaaaatgatcttcaatatatagctatggccaaaagatgggctaaagcttatacaattactgtagcagtgggagttgttacaggtacaattataggacttcaattatcattgatttggcctacatttatggaaatgggtggacacgttattgcacttccattatttatggaaacatttgcgttcttctttgaagctattttcttaagtatatatttatatacttgggatcgttttaaaaataaatggacacatttcttaattagtataccagtaattattggtggctctttctcagcattcttcattacttcagtgaattcatttatgaatacgcctgcaggttttgagttgaagaatggaaagatggtcaatgttcaacctatagaagcgatgtttaacccatcgtttatagttcgatcatttcacgtaattactacagccggtatgacgatggcatttgttattgcatcaatagcagcttttaaattattgcgtaatcgtcaacctaaagatactgtctaccataagaaagctttgaaaatgtctatgattgttggattcttttcaactttactttctatgttggcaggggatttatctgcaaaatttttgcataaattccaacctgaaaaattagcagcttatgaatggcatttcgatacatcttcccatgccaaattattattatttggtgtgttagatgaaaagactcagcaagttaaaggtgcgattgaattacctggactattgagtttcttagcagataatagtgtcaaaactaaagtgcaagggttaaatgattttccaaaaagtttacatccgcctatgattgtccattatttctttgatttaatggtaacgatgggaattttatgttttgtcatttcaggtgtttatgttttaactttaatgtttaaaaagcttagaaagttttctactcataaatggatgctttacggaatattattaacaggcccagcttcaatgctagctatagaatttggatggttcttaacagagatgggtagacagccttggattgttcgtggttatatgcgcgtggcagaagcagcaacacaagcaggcggaataaccttcgttacaattttatttggcatattgtacatcattttaatgtatacatgtgcatacgtattaattcgtatgtttaaaaataaaccggcgtatgaagatgtaaatcgtttagccaagaagcaaggaggagaaatagaaaaatgatttatgcatttataggtataacagtgttatggttgtttttattttgctatatcattattgcttctatagattttggggcaggtttcttcgcattgcattcaaagttaactggtgatgaaaagaaaattaatcacttaatttcacgttatttaaacccagtttgggaagttacgaatgtattctttgttttcttcttcgtaggattcgtaggtttctttccagagtcaatcaaatatttaggcacggtattgttaataccaggttcaatagcactgattatgatatcgttgagaaacagtttttatgcatttgaaaattatggtcaagatacaaaattagcatggatgatcatgtatggggtaagtggattattaattccagcttcattatctactgctttaactattacagaaggtggctatattaatgttcgaaacaatgttatcgatctagattgggtgcagttactattaagcccatttgcttggtctgtagtattcttggcaattatttcagttttatatatttcatcaggatttttgacatattatgctaaaaaagcaaatgacgaaccagcatataatttaacaagacaatggcacatatttttagggccgccgatgattatcatttgtttattcgtatttctatcattacgcattcaaaattctgaacatttttattcagctgtttttgactattggtggatgtttggtataagtttcttattctttgcattagcttcattgttaacattctttaagaaaaaacatggtttggcttttgtatttgttattttacaaatgatgttcgcgttctttggctatggtattagtaaattgccataccttttatatccgtttgtaaaaattacagatgcatatgttaatccaaaaatgggctggacattagtgattgtctttattttaggtttacttttattacttccatcgttaatattattattaagattatttgttttcgacaaagaatatgttgaaggaaagaaatcataagttgagacgataccccaactttcatttacttgcattactgcatttagataatttagttggggtactcatttataataattttaaatttatattttcaatgaattgatgaaaatcatttaatggagggcgagtatgggtaaagaatatgtagtcatcggtctaggtcgttttggaggtagtatcgttcgtgagttgaatgcattagacatggatgtaatggccatcgaccatgatgaaaatagagtgaatgaatatagtgatatcgctactcatgcggttgttgcagacacaacagatgaagcagttatgaaaagtttaggtatccgtaactttgatcatgtcattgtggcaattggtgaaaatattcaatcaagtacgttgacgactttaattttaaaagagttaggtgtaaaaaaagtaactgctaaagcacaaaatgattatcatgcaaagattttaaataaaattggagcagatacggttgtgcaccctgagcgtgatatgggtagacgtattgcgcataatgttgcgagtgcaagtgtacttgattatcttgagttggcagacgagcattctattgtagaattgaaagcaactgaaaagatggcggggcagtctatcattgatttagatataagagcacaatatggaattaacattattgcaattaaacgaggcaaagagttcatcatttcaccaaatccaaatattaatttagaaataggtgatattttaattatgattggacatgataatgatttaaatcgctttgaaaaaaatattgcgacgagataatcgggagtgggacagaaatgatattttctcaaaatttatttcgtcgtcccaccccggcaaggttgactagaattgaaaaaagcttgttacaagcgcattttcgttcagtcaactactgccaatataactttgtagagcattgaacattgatttatgtctcaagctcatcatatataaagaaaaagctactaacaatgggtggtgagtttaattaaaacttcacttcaaagttagtagctttttgattatttattgtttgattctttttgttcgtttaccttcataatgactggtaaaatcattggttttctagctgttttttcaaataaataagattgtaatgtttcaatgatagaagatttaatctgatgccattgaatatctttattttgatttaacttactaataacatcagttttgattttgcgttgtgcatcataaattaattgacctgattctctcatatatacaaatcctcgagaaataatgtctggaccagaaagtaatttatttgtattaaaatcaatactaacaacaacgataactaaaccttcttcagataatagcttacggtctcttattacaacattaccgatatcaccgataccactaccatcaacaagtacattaccagatggaatgcgaccagctttacgtgctgaatcgtgtgttaaagctaagacatctccaatatcaaagatgaagacattatcttcttcaacgccgcattcaacaccagtctcaccatgtgcttttaacatacggtattcaccatgaataggtaagaaatatttcggcttgattaatcgaagcattaattgttgatcaccttgagaaccatgccctgaagtatggatgttagaaatcttgctatggataacatctgcaccagctttatacaaggaattaatagttctgttaatactttttgtattacctgggataggtgatgaactaaatacaacggtatcttcaggtataattttaatttgcttatgagtaccattagcaattctagataatgctgccattggttcaccttgtgaaccagtacatagtatcaataactcatgcttcggtacggtattaattttattaggttcaataaatgtttcaggtggtgctttaatataaccaagttccataccgattttaatattgttttccatcgaacgaccgaacgtaacaattttacggttatttttgatagcagcttcaactgcttgttgaactcggtaaatattagaagcgaaggtagcaaatataatacgacctttacaattacggaagatcttatctacgttttgaccaacttcacgttcgcttaaagtaaaatcaggcacaagtgaatttgttgagtctgaaagtaaacatagaacgccttcttcgcctaattgagccattttagcaatgtttgctggtttgcctacaggtgtaaaatcaaatttaaagtcaccggtatgaactacttttccttcaggtgtatctacgatgacgccataagtttcaggaatactatgcgtagttaagtagaaagaaatcgtaaagtgcttagatttaatcacactgtcctcattgatttcatttagtttagcagtacgtaataaatgatgttcttcaagtttattacggattaaacctaatgctaaaggaccaccataaataggtatattaagttgttttaataggaagggcacaccgcctatatggtcttcgtgaccatgtgttataaataggccaacaattttatcttggttttgaactagatatgtgtagtcaggtataacataatcaatccctaataagttatcatcagggaatttgatacctgcatcgataatgacaatttcgtctttatactcaactgcataagtatttttaccgatttcacctagacctccaagtgcatatacacctacttcatttggatgtaattgtttcattatttagcaatctccacattaaagtgttctgagttttctttttcgtaatctaaatgtgcgccctctaatttagtgataaattcgatattaaaattacgatctttcaagtaacgacgtacttgttcttctgtttgagcttcaacataaagtgattgtgtattttcacgcacaattacctcgtctctgttatgttgataaaaaactttaaatactgccatgttaaaaattcctcctaagaatgtttgtttaatttattgttaaccctagtaaaatcgtattggagtatatatcgataaattcattccaatcatctctataatttaacttaataacgatttggttaataactaggttcatcatgtcgttcattttaaaaaattagtgaaataacactaaaatttcagttaaatcttattttacatgatgaatgataataaataaagcagtttatctcactagaaatctaagtatttcgaataaatgtgcagttctatttattaaaataaatgtagagattataaattaatgttaagaaagaattaaaggattttatatgaaacggtaaaatttaaatgaggggataaaaagtttggtagaaaggtgaatatatttaactgttgtttattcgaaaaagttgtacaagaaaaagcttaggacatcatatttatcctaagctttgataattagtaatagtgtgttttaaacttctactgcatctgtatgtggttgtaatgggtggtctttgtcaatgtgatcatagaacattacaccatttaaatgatcaatttcatgttggaaaacaattgctggatatccttttagacgtaattgtatatcattaccttcgatgtctttggctttaattgtaattctattatgacggtgaactagaccagcaacattatcatcgacactaaggcaaccttcaccagttggtaaataagcttcttgaacgctatgacttacaatttttgggttcacaagcatatagtcataagatttgccactgccatcatctggtattaaaacagcaatcatacgtttagagatattaatttgaggtgcagccaaaccaacgcctgaacgtaaaccatatcgtttcgcgatttcctcatcttgactatttactaaaaactctctcatggcgattaatgtttctttttcttctttagttaatggtaattctaactcagctgctttttgacgcaaagttggatgaccatctctaatgatgtctttcattgttaacatatattgcaccttccttattttaatttgttttagttgaatgacagtaaaaaggttgttaagatactcatacatttttatgtgtaaatatctacaaagttaaccaactactgccaatgtttattttagatagtatatgtaaattttcagatatgctaattgcttaaaaaatgattaaagtgttggtttcaagcaatgatactttagaaatttatttatcatcttgactttaaaaattatattataaatgacgtaactgtcaacagatatacttagtaatgaagatgtgtaatgtaattgtttaaaattgatttccaagcagattttatttatcatttaatttaaatagcaagtggaggtacaagtaatgaaatttggaaaaacaatcgcagtagtattagcatctagtgtcttgcttgcaggatgtactacggataaaaaagaaattaaggcatatttaaagcaagtggataaaattaaagatgatgaagaaccaattaaaactgttggtaagaaaattgctgaattagatgagaaaaagaaaaaattaactgaagatgtcaatagtaaagatacagcagttcgcggtaaagcagtaaaagacttaattaaaaatgccgatgatcgtctaaaggaatttgaaaaagaagaagacgcaattaagaagtctgaacaagactttaagaaagcaaaaagtcacgttgataacattgataatgatgttaaacgtaaagaagtaaaacaattagatgatgtattaaaagaaaaatataagttacacagtgattacgcgaaagcatataaaaaggctgtaaactcagagaaaacattatttaaatatttaaatcaaaatgacgcgacacaacaaggtgttaacgaaaaatcaaaagcaatagaacagaactataaaaagttaaaagaagtatcagataagtatacgaaagtactaaataaggttggtaaagaaaagcaagacgttgatcaatttaaataattaatataatacagatggtaggaaacaactaatacagttcctattatctgtatctttttttattaaaacagaactttttcaaatggtttaacagtcccatttatttgtggtacaattagtaaggataaaatgaatttctatacaattatgggaaaggtatggtgaattgaatggctcctaagttacaagcccaattcgatgcagtaaaagttttaaatgatactcaatcgaaatttgaaatggttcaaattttggacgagaatggtaacgtcgtaaatgaagacttagtacctgatcttacggatgaacaattagtagaattaatggaaagaatggtatggactcgtatccttgatcaacgttctatctcattaaacagacaaggacgtttaggtttctatgcaccaactgctggtcaagaagcatcacaattagcgtcacaatacgctttagaaaaagaagattacattttaccgggatacagagatgttcctcaaattatttggcatggtttaccattaactgaagctttcttattctcaagaggtcacttcaaaggaaatcaattccctgaaggcgttaatgcattgagcccacaaattattatcggtgcacaatacattcaagctgctggtgttgcatttgcacttaaaaaacgtggtaaaaatgcagttgcaatcacttacactggtgacggtggttcttcacaaggtgatttctacgaaggtattaactttgcagcagcttataaagcacctgcaattttcgttattcaaaacaataactatgcaatttcaacaccaagaagcaagcaaactgctgctgaaacattagctcaaaaagcaattgctgtaggtattcctggtatccaagttgatggtatggatgcgttagctgtatatcaagcaactaaagaagcacgtgaccgcgcagttgcaggtgaaggtccaacattaattgaaactatgacatatcgttatggtcctcatacaatggctggtgacgatccaactcgttacagaacttcagacgaagatgctgaatgggagaaaaaagacccattagtacgtttccgtaaattccttgaaaacaaaggtttatggaatgaagacaaagaaaatgaagttattgaacgtgcaaaagctgatattaaagcagcaattaaagaggctgataacactgaaaaacaaactgttacttctctaatggaaattatgtatgaagatatgcctcaaaacttagcagaacaatatgaaatttacaaagagaaggagtcgaagtaagccatggcacaaatgacaatggttcaagcgattaatgatgcgcttaaaactgaacttaaaaatgaccaagatgttttaatttttggtgaagacgttggtgttaacggcggtgttttccgtgttactgaaggactacaaaaagaatttggtgaagatagagtattcgatacacctttagctgaatcaggtattggtggtttagcgatgggtcttgcagttgaaggattccgtccggttatggaagtacaattcttaggtttcgtattcgaagtatttgatgcgattgctggacaaattgcacgtactcgtttccgttcaggcggtactaaaactgcacctgtaacaattcgtagcccatttggtggtggcgtacacacaccagaattacacgcagataacttagaaggtattttagctcaatctccaggtctaaaggttgttattccttcaggcccatacgatgcgaaaggtttattaatttcttctattagaagtaatgacccagtcgtatacttagagcatatgaaattgtatcgttcattccgtgaagaagtacctgaagaagaatatacaattgacattggtaaggctaatgtgaaaaaagaaggtaatgacatttcaatcatcacatacggtgcaatggttcaagaatcaatgaaagctgcagaagaacttgaaaaagatggttattctgttgaagtaattgacttacgtactgttcaaccaatcgatgttgacacaattgtagcttcagttgaaaaaactggtcgtgcagttgtagttcaagaagcacaacgtcaagctggtgttggtgcagcagttgtagctgaattaagtgaacgtgcaatcctttcattagaagcacctattggaagagttgcagcagcagatacaatttatccattcactcaagctgaaaatgtttggttaccaaacaaaaatgacatcatcgaaaaagcaaaagaaactttagaattttaatacattttaaaagttaacgaagttagcgtattttagtctcattgattaaaatgaaatgtttaatttacgaaatcttaggagggcaaaaacgtggcatttgaatttagattacccgatatcggggaaggtatccacgaaggtgaaattgtaaaatggtttgttaaagctggagatactattgaagaagacgatgttttagctgaggtacaaaacgataaatcagtagtagaaatcccatcaccagtatctggtactgtagaagaagttatggtagaagaaggtacagtagctgtagttggtgacgtgattgttaaaatcgatgcacctgatgcagaagatatgcaatttaaaggtcatgatgatgattcatcatctaaagaagaacctgcgaaagaggaagcgccagcagagcaagcacctgtagctactcaaactgaagaagtagatgaaaacagaactgttaaagcaatgccttcagtacgtaaatacgcacgtgaaaaaggtgttaacattaaagcagtttctggatctggtaaaaatggtcgtattacaaaagaagatgtagatgcatacttaaatggtggtgcaccaacagcttcaaatgaatcagctgcttcagctacaagtgaagaagttgctgaaactcctgcagcacctgcagcagtatcattagaaggcgacttcccagaaacaactgaaaaaatccctgctatgcgtagagcaattgcgaaagcaatggttaactctaagcatactgcacctcatgtaacattaatggatgaaattgatgttcaagcattatgggatcaccgtaagaaatttaaagaaatcgcagctgaacaaggtactaagttaacattcttaccttatgttgttaaagcacttgtttctgcattgaaaaaatacccagcacttaacacttcattcaatgaagaagctggtgaaatcgttcataaacattactggaatatcggtattgcagcagacactgatagaggattattagtacctgttgttaaacatgctgatcgtaagtctattttccaaatttcagatgaaattaatgaattagctgttaaagcacgtgatggtaaattaacagccgatgaaatgaaaggtgcaacatgcacaatcagtaatatcggttcagctggtggacaatggttcactccagttatcaatcacccagaagtagcaatcttaggaattggccgtattgctcaaaaacctatcgttaaagatggagaaattgttgcagcaccagtattagcattatcattaagctttgaccacagacaaattgatggtgcaactggccaaaatgcaatgaatcacattaaacgtttattaaataatccagaattattattaatggaggggtaaaacatggtagttggagatttcccaattgaaacagatactatagtaatcggagcaggtcctggtggatacgttgcagcaattcgtgcagctcaattaggacaaaaagtaacaatcgttgagaaaggtaatcttggtggtgtttgcttaaacgtaggatgtattccttcaaaagcattactacatgcttctcaccgttttgttgaagcacaacattctgaaaacttaggtgttattgctgaaagtgtttctttaaacttccaaaaagttcaagaattcaaatcatcagttgttaataaattaactggtggtgttgaaggcttacttaaaggtaacaaagttaacatcgttaaaggtgaagcatatttcgtagataacaatagcttacgtgttatggacgaaaaaagtgcacaaacatacaactttaaaaatgcaatcattgcaacaggttcaagaccaattgaaattcctaatttcaaattcggtaaacgtgttatcgactcaacaggtgctttaaacttacaagaagtaccaggtaaattagttgtagttggtggaggatacattggatcagaattaggtacagcatttgctaactttggttcagaagtaaccatccttgaaggtgctaaagatatcttaggtggcttcgaaaaacaaatgacacaacctgttaaaaaaggtatgaaagaaaaaggtgttgaaatcgttactgaagctatggctaaatcagctgaagaaacagataacggagttaaagttacttatgaagctaaaggcgaagagaaaacaatcgaagctgattatgtattagtaactgtaggtcgtcgtccaaacacagacgaattaggcctagaagaattaggtgttaaattcgctgaccgtggattattagaagttgataaacaaagccgtacgtctatcagcaatatctatgcaattggtgatatcgttccaggtttaccacttgctcacaaagctagctatgaagctaaagttgctgctgaagcaattgatggtcaagctgctgaagttgattacattggtatgccagcagtatgctttactgaaccagaattagctacagttggttattcagaagcgcaagctaaagaagaaggtttagcaattaaagcttctaaattcccatatgcagcaaatggtcgtgcattatcattagatgatactaacggatttgttaaacttattacacttaaagaagatgatactttaatcggtgctcaagtagttggtactggtgcatcagatattatctctgaattaggtttagcaattgaagctggtatgaatgctgaagatatcgcattaacaatccatgcacatccaacattaggtgagatgactatggaagcagcagaaaaagctatcggatacccaatccatacaatgtaataactgattatctataaagattcagtcattaaaagctgtagcatatgctacggcttttttgttttaggtaaagtaatgtaaggaaattgatttgagatatcgttaacatgtgacatgcatgttatacttgcgatgctaacaaaagaattgaaatggagggttcaacaatggaatatgagtatccaattgatttagactggagtaatgaagagatgatttcagtgataaatttctttaatcatgtagagaagtattatgaatccggcgtgacggcaggcgactttatgggtgcatataaaagatttaaagaaattgtgcctgctaaagcagaggaaaaacaaatttttaatactttcgaaaaaagtagtggctataatagttacaaagcagttcaagatgtaaaaactcactctgaagaacaaagagtaacagctaaaaaataattcgttcgaaattaacacaatttaataggattttttctttaaaactattgctaataaagctatattttgatacctttatcaagtgttaaacaaaatgtttgataaaagtaaacttaatatagcttttttaggtggaaaaataaatgaacataggtaataaaattaaaaatcttagaagaattaaaaatttaacgcaagaagaacttgctgaacgtacagacttatcgaaaggctacatttcacaaatagaaagtgaacatgcctcaccaagtatggaaactttcttaaatattatagaggtgttaggaacgacgccaagtgaattttttaaagacagtgaaaatgaaaaagtattatacaagaaggaagaacaagttatttatgatgagtatgatgaaggttatatattaaattggttagtttcaaagtcaaatgaatatgatatggagccattaatattaactttaaagcctggagcatcatataaaaattttaatccatcagagtctgatacgtttatttattgtatgtcaggtcagataacacttaatttaggcaaagagatatatcaagcacaagaagaagacgttttgtattttaaagcacgagataatcatcgtttgtcaaacgaatcaaacaatgaaacacgaatacttattgtagcgacagcttcatatttataggggggatcttatttggaaccgttattatcattaaaatcagttagtaaaagctatgatgatcttaatatcttagatgacatagatattgatattgaatcaggatacttttatacattattaggtccttcaggttgtggtaaaacaacaattttaaaattaattgcagggtttgaatatcctgacagtggtgaagtgatttatcaaaacaaaccaattggtaatttaccaccaaataaacgtaaagtgaatacagtctttcaagattatgcattatttccacacttaaacgtctatgataatatcgcttttggtttgaaattaaaaaaattatcaaaaaccgaaattgatcaaaaagtaactgaggcattaaaattagtaaaactttcaggttatgaaaaaagaaatattaatgaaatgagtggcggacaaaagcaacgtgttgcaattgcacgtgctatcgtaaatgaaccagaaatattattgttagatgaatctttatccgcattagatttgaaattgcgtactgaaatgcaatatgaattacgagaattgcaatctagattaggtattacatttatatttgtaacacatgatcaagaagaagcgttagcattaagtgactttctttttgtattaaaagatgggaaaattcaacaatttggcacaccaacagatatatatgacgaaccagtgaatcgatttgtagctgattttattggagaatctaatattgttgaagggcgcatggttagagattatgtcgtgaatatttatgggcaagatttcgaatgtgtcgatatgggtattcctgaaaataaaaaagtagaagtcgttattcgaccagaagatatatcattaatcaaagctgaagaaggattatttaaagcaactgttgattctatgttatttagaggggtccactatgaaatatgttgtatagacaataaaggttatgaatgggtaatacaaacgactaaaaaagctgaagtaggcagtgaagttggtctttattttgatcctgaagccattcatattatggttcctggagaaacagaagaagaatttgataaacgtattgaaagctatgaggaagtagacaatgcgtaatactaataaatttctcttaatcccgtatttactatggatggttatatttattattgtaccagtcgtattactcatttatttttcatttttagatatcaatggacattttagtttcacgaattatcaacaaatttttactacaaaatatttgaaaatgtttgcatattcaattttatatgccgctttaataacaattattaccttggctatcagttatccagctgcctattatattactcgttcgaaatttcaaaatatcttattaatgataatgattattccaacatggataaatttattgttaaagacatatgcttttataggtttattaagtcatgatggcgtgattaatcaatttttccacttatttaatttaccatcattcaatttgttatttacaactggtgcgtttttagtagtggcaagttacatttatattccatttatgattttacctatatttaatagcatgaaagcaattcctaataatttattgcaggcctcaagtgatttaggtgccagtcctttctatacttttagaaaagtaatcatgccgttaacaaaagaaggtgttatgactgggattcaagtaacctttattccatcactttcattatttatgattacaagattaattgcaggtaataaagtcataaatataggtacggcaatagaagaacaatttttaacaattcaaaattatggtatgggatcaactatagctatattcttaattgtatttatggcattcattttaatcattacaaaatcatctaatgggagagggtgaatcatatgaaatggtatggaaagctgtatatcgggatacttttagcgattttatacatcccaatattctttttaatgttctattcattcaattcggctggtaatatgattcactttgaacattttacattagagcattatcaatcattatttcaaaatgatcatttaatgtcggtcatttttaatacgatagctgtagcacttttagcagcctcaatttctacagttattggtacatttggtgccattgctatttattatttaagaaataaaaagtttaaagtaactttactaacattgaataatgtcttgatggtatcatccgacgttgtcataggtgcatcattcttaattatgtttacaacgattggccattttactggtcttggtttaggattttggacagttctaatatctcatattgcattttgcatacctatagttgtgattatcgtcttaccacaactgtatgaaatgaataataatatgttaaatgctgcaagagatttaggagcgactgaaccacaattattaagcaacattattattcctaatattttaccttctattataggaggattctttatggctttaacttattcactagacgatttcacagtaagtttcttcgttactggtaatggctttagtgtgttatcagttgaagtttatgctatggcgagaaaaggaattagtatggaaattaatgcgatttcaacattattgtttgctgttattgtattaggaatactaggatattatttgattcaatacgtgataaataagaaaaaactaatcaagcgaggtgtaaaataatgaaacgttttttacaactcattataggtgcattagttgtgggtatgctttgtcttactttaagtcattggtttaaatctaaagaacaagtgcatacaaatcaaaaaatttacgtatacaattggggcgaatatattgatccagagttaattaagaaatttgaaaaagaaactggcattcaagtcgtttatgaaactttcgattcaaatgaagcgatggaagccaaaattcgcaatggcggtacacattatgatgttgcttttcctagtgaatatacagttcaaaaattgaaaagagatcatttattgttaccaatagatcataataaggtacctaatattaaaaatttagattcagattatatgaatatgtcatttgatagaggcaataaatattctttaccttatttctttggaactgtaggtattttatataataaagaaaagtatccaaatgaatcatttgatagttggaagtcattgtataatcctaaatttaaaaaccaaattttactagttgacggtgctagagagattataggcatgagtttgaataaacttgggtataatctaaatgaccgtaattcgcaccatttaaaagaagcagagcgagatttaaccaaactagcaccacaagtaagaggtgtcgtaggtgatgaaattaccatgatgcttcaacaaaatgaaggtaacatagcggttgtttggagtggtgttgcagcacctctagtgcaagaaggggataaatataactatgttattcctaaagaaggatcgaatttatggttcgacaatatggtaattccaaaaacggcacaaaataaagagggtgcatataaatttatgaattttttattagatgctaaaaataacaagcagaatacagaattcgtaggctatgcaacgccaaacaaggctgctcgacaattgttgcctaaagaggttaaagacgaccatcgtttctatccgactaagaaagagcaagaacgccttgaagtttataaagatttaggacctgaagttttaagtgaatacaatgaaaactttttgaatttcaaaatgtcattaaaataaaatcataaatagtagttatttactgtatatttagttataataacgggataagtactataaggagttgtaacgaatgactggagaacaatttactcaaattaaacgtccagtaagtagattaactgaaaaagttctaggttggttatgttgggtgatgttattagtgcttactgtcattacgatgtttatagcacttgtttcattcagtaataacacatcgattgctaatcttgaaaatacattaaacaataatgcatttatccagcaattattagctggaaatggctataatacaacacaatttgtaatatggttacaaaatggtatatgggctataatcgtttactttattgtttgtttgttgatttcatttttagctctcatatctatgaatataagaatcttgtcaggtttcttattcttaatatcagcaattgtaacgattcctttagttttacttatcgttactttaatcattccgatattattctttattattgcgatgatgctatttataagaaaagataaggttgaaatggttgcgccacaatattatgaagagtataacggaccgatttatgattatcgtgaacctgtgtatgagcgcccccaaccgaaagatgattattatgatgtgcctaaatatgaaaaagaattggataaatcaaacactgtatatgatcaagaacaggaaagagataaatatgatcaatttcctaaacgtgcagttgaaagtgaatataatcatgatgagcgcactgaggaagaaccatcagtattatccagacaggctaaatacaaacaaaaaagtactgaagaactaggtattgaagatgatggttattatgcagaacctgaagttgatccaaaagaattgaaagcacaacaaaagcgagaaaaagctgaaattaaagctaagaaaaaagaaaaacgtaaagcttataaccaacgaatgaaagaacgtaggaaaaatcaacctagcgcagttagtcaacgtcgaatgaattttgaagagcgacgtcaaatttacaacaatgatatttctgaagaacgcaattcaagtgaagttaaggacaaaaaagagcaagaataaatattgatgatacccagattagtaagtagaggtcttttgcttattaatctgggtttttatatgaggttaattatcgataacgtttaattaaagtgtttaggtgtcataattttaaatgacgatttctcattaccatacacctaaattatcatcaatctgaattcagatgtttattataaaaattagatgaaaaatatgttaatatacaagtaatttaatgtgcgtatatctataggctcgtagtatacttattaaaatattaaacaaagaaaggattttaagatgaatagaaaacctgaattaatcatggcttggattgcaaatagtattagtattatttatttattagttatggggctatcctatttttctttaaaaagtggtaatgcatcacaacgtgaagaattagcgaagcaattatctcagaacggtggcaatgtttctttagatatgcttcagacaacaatgggtgcattagcaattattttattaatttcaacactttatggtatatttgcgacaatttgtattaaagggcgtagaaaattatcgattatactttttgttatcgcgataattgtaagtttgatggctcttaatttaattgcaattgtcttatgggttatcgtgatgattatgttgatttctaaaaaagaatcaaaagaaactacacataaggacgatgagtatatttatcattaatatgttcatagcaaaagaaaaaccattaaaatgttaagttgttaattattagatacaaccagcattttaatggttttatttttaactttgtagttcttggaatgtttgaacgattaaatagacatttaaaatacttagaataataataagtgtccatgaaatgatattaacccatgttttattatagaaaggtcccatcaagtctttattactagtagccaattgtaatggtattaaacagaatggcagagcaatacttaaaaatacttgagagaatacaagtagttgctcaattttagctgcattacctttaaaaatgattaagcatacgataacaggaatgacagcaagggaacgtgtaattaaacgtcttaaccaatttggtatgtgtaatcttaaaaatccttccattacaatttgtcctgctaaagtaccagtaatcgttgaattttgacctgacgctaataatgcaactgcaaataatgtactcatgattgcacccattgttgcacctagtacaggttcagtttttaaggcgtgatataaatcatagaaaccacctaaatcgtcagcgtttgagttgaaaaatagtgatgctcctaacactaataataagcaattgactacaaatgcgattgataactgaatgttcgaatctatcgtagcaaatttaatcgcttgggccttttcttcattgttatgtcttgagtatgttctagattgtacaattgatgaatgtaagtacaaattatgaggcataattgtagcgccaataatacctaatgcaatatagagaatgccgttatttgtaatgatttcactatgtggtataaatccatttaacacagcgttcaactgtggtgatgaaatatagacttcaaatataaagatgaataacactgtgaaaattaatgtaccaacaatagcttcaatttttctaaaaccatatttcattataaatagtagtaaaaatacatcaagtacagttattagtgcaccgacgattaaaggtatgttaaataggagattaagagcaatagcactaccaattacctcagcaatatctgtggcgataattgctagttctgcaatgatccaaaatattatagcaataggtcttgataaataatgtcgtgtcatttgagctaagtccatacctgttgctattcctaatctcactgtcatgctttgaagtaacattgctgataaacttgaaataagaattacgaatagcaaagtatagccatattgcgcgccaccttgcattgatgttatccagtttccgggatccatgtaaccaacagcgactaataacccaggtccaagaaatgataaaaatttctgtttatttgaactgcgatgatcgaatttaattgtattgtttatttcgtctaaacttaattgttcatttgttgaatgtcgtttattattcattttgactcacctctacttcttatggacaatataataacctaataaaatgtttaggtcaacctaaatttattttaatttttttaaaagcctgaattattatgttgaacgttcgatttaatattaagaaaaaagagcacgaaatcatggatgtgattaagtgctctattatttaaacaaagttatttatgcagaataaaatggtaagaactgatcgaaggtttcttctaaaaatgcaataaatgctttgtcactttttaatcttttatcttgtggtgtgattgcacgcgctataaagaattcaccttttttcacattgatggctctttgtatcgcttcttttaaatcatcatccgttaaatctttaataaatggtttatcaggtttcatatgatctaagcaaacacgataatcgtcaggtaattgttgaatagctttaaattttctttcaaaaacttttgcacgtgttgctttatcttttgcttcatgcatgattccaaacataacaaacagttgatcttcaaacataccaatttggaaatgaggtaacattttatagcctcttttgtttgttgcaaaagcaacccatgtatctttaggaggattcacacttcttctagcatgctttgctacgtgaggataaaatgtttcaccagtttgacttgtaaagaagtcactaaaatattctcctaattcatggagttgtggtcgtatgtattcgtttaaagcttccattcgtgcgtctaagccttctacgttgaacgctttgaaatctttaggtttaaatgtatattttgtcatagagtacctcctgtatagtgtttaaaaatattgtagcatatgttttatcaattgcggcttaagatgctctcattaaaattagtattttcatttttatcataagaagttatttttataaaatgttgatgtataataaagatgttaggagatgatgttatggcactttatggatttgcccaaggacttattcaagaagcaggaattagaattaaacaattgatggagcaaaatttaacaattgaaacaaagtcaaatccgaatgaccttgttacaaatgtagataaagcaacagaagatttcatttttgatacaattttagaaacatatcccaatcatcaagtattaggtgaagaagggcatggtcatgacatcgatacttccaaaggtacggtatgggttgttgacccaatagacggtacattgaattttgttcatcaacaagaaaatttcgcaatttcaattggtatttatatcgatggtaaaccttatgcaggttttgtatatgatgttatggctgacgtcttatatcatgctaaagtaggggaaggtgcatatcgtggtagccaacccttgaaaccattgaatgattctaatctaagacaaagcattattgggatcaatccgaactggttaactaaaccaattttaggagaaatctttaaagaaattgttaatgattctagaagtgcaagggcatatggtagtgcagcgcttgaaatcgtttcagttgctacaggtaatttagaagcatatatgacgccaagacttcaaccatgggattttgctggcggattggttattttatatgaagtaaatggacaagcttccaatttactaggagaaccattaacaattagtggtccaaattcaatcttagttggaaatcgtggtctccatcaagaaattagcaacgattatttagagccccaccatgatgcgttaatacaattacatgaacaacgatttaaaagaaaatcaaaataattaccaaaagcgtaatatgaagtcctaacaattaggtaacatattacgcttttataccttaaataataaaaacacgcgccaatataaaaccagttaaatgttcatcatgaacatgtgtggtcttaaatcaacgcgtgttattgtcgatataacttatagccaatcgttttctcgatattttttctttgtagtaaatccaattccaaaggttgcaacgagtaatataaatgttaaaatcatcattggtacatttgatgcaccaacagcaaaactaaataatactaagaaaacaacagctaatatagaaaatacccaaaagatatttttagattttttttgtttcatcctatccccaccttttgcttatcttttctcaattatatgatataataaaaaagttgtaattaaaagtgggattttacttaagaaagaaggaaactatttatatgactaataaaagagaagatgtccgcaatatagcaattattgctcacgttgaccatggtaaaacaactttagtagatgagttgttaaaacaatctggtatattcagagaaaatgaacatgtcgatgaacgtgcaatggactctaacgatatcgaaagagagcgtggaattacgattctagccaaaaatacggctgttgattataaaggtacacgtattaatattttggatacaccaggacatgcagactttggtggagaagtagaacgtattatgaaaatggttgatggggttgtcttagtagtagatgcgtatgaaggtacaatgcctcaaacacgttttgtacttaaaaaagcgctagaacaaaacctgaaacctgttgttgttgttaataaaattgataaaccatcagcacgtccagagggtgttgtagatgaagttttagatttatttattgaattagaagcaaacgatgaacaattagaattccctgttgtttatgcttcagcagtaaatggaacagctagcttagatcctgaaaaacaagatgataatttacaatcattatatgaaacaattattgattatgtaccagctccaattgataacagtgatgagccattacaattccaagtagcattgttggactacaatgattatgttggacgtattggtattggtcgtgtattcagaggtaaaatgcgtgtcggagataatgtatcactaattaaattagacggtacagtgaaaaacttccgtgtaactaaaatctttggttactttggattaaaacgtttagaaattgaagaagcacaagctggagatttaattgctgtttcaggtatggaagacattaatgttggtgaaactgtaacaccacatgaccatcaagaagcattgccagttctacgtattgatgagcctactcttgaaatgacatttaaagttaacaattctccatttgctggccgtgaaggtgactttgtaacagcgcgtcaaattcaagaacgtttaaatcaacaattagaaacagatgtatctttgaaagtttctaacacagattctccagatacatgggtagttgctggtcgcggtgaattgcatttatcaatccttattgaaaatatgcgtcgtgaaggttatgaattacaagtttcaaaaccacaagtaattattaaagaaatagatggtgtaatgtgtgaaccatttgaacgtgtgcaatgtgaagtgccacaagaaaatgcaggtgctgttattgaatcattaggtgcacgtaaaggtgaaatggttgatatgactacaactgataatggacttacacgtttaatctttaatgtaccggctcgtggtatgattggttatacgactgaatttatgtcaatgacaagaggttacggtattattaaccatacatttgaagaatttagaccacgtattaaagcacaaattggcggtcgtcgtaatggtgcattaatttcaatggatcaaggttctgcaagtacttatgccattttgggacttgaagatagaggtgtaaacttcatggaacctggtactgaagtttatgaaggtatgattgttggtgaacataatcgtgaaaatgatttaactgttaacatcactaaaacaaaacatcaaactaacgtacgttctgcaacgaaagaccaaacacaaacaatgaatagaccgcgtattctaacattggaagaagcgttacaattcattaatgatgatgaacttgttgaggttacaccagaaagcatacgtttaagaaagaaaattttaaacaaaaatgttcgtgaaaaagaagcaaagcgtatcaaacaaatgatgcaagaaaacgaataatttaacataataaaagagaagctgagcgatgaaagttgcttagcttctcttttggcatataatatttgaaaaagtgtttaaatgctattatttcctgttactttcacattttcaaatttctaacttgtttattcagatattaatcgagcggatagtgttgcgcacgttgtttaggtgtgtctaatcgacttttacaatcatcacacataaatgttcgaataggattgtttttaagtcgtttagactcagttgtgcgctcatctataaatacttttgcatcacagataatgcattgcacttgtctcaaattaaatcacctcaatatgagttacatggttgattcgatatgaataaccatcttcttgattgtaaataaaactatctacaccattatcgctgtaaagtcgtttaccgtcttttgcaaattggaaaaataaatagggtaatagatctatcggtatatctaaatgattatgctcatttgataatcgaatagtagttgcagagtcatgtggttcggaatgtttgaaaaaaggtgtcatattaatgacaaatgaaccttctaacatggcacgttttttatattttatttctgaatttaaagtaggcggattagtttgtccttctaggatagcacgattccattcatgattatcttcaaagtcgattggttttgaaccatcaaatacacctttttctaaatcttcgatgctaacttttctatcatcgaaaatccaagtcgtactatctaatgttataggaaactttacggctcctttaatttgtatcattttcccactccctatcaatgtatatagcattattttaacacaaattgctaacgacacattttaaatctacttgctttttaatatttagtaagataaacttttagtaagacttgagaatttatatagagggggagcgtgtcatggcgaaacaagcaacaatgaaaaatgcagctttgaaacaattgactaaagatgctgatgaaatcttgcatctgattaaagttcaactagataatttaacattaccttcatgcccattatatgaagaagtactagatacacaaatgtttggacttcaaaaagaagttgattttgctgttaaattaggtttagttgaccgcgaagatggcaaacaaattatgttacgtcttgagaaagaactttcaaaattacatgaagcttttacacttgtttaaggtttaatatataagcatattaaaatggcgtgagatatcgacaattgagctgcgccgattttatatttatagtttaattactgattaaagtggctgttatgttgtcttcttgatgacatgtcagtcacttttattgggttttagcaattcacgatattaagtaaacaaatattctataaattacctcaagagacctgttaatatttgtgattatgactgtgtcatgtatataataagtaacatggatttttaaaattaaagtataaaacgaaatcatttgaagtataaattgtagaattggatgactgaatatatgaagaattttagaagtattttacggtatattggtaaaacctcaaagtttattgattatccgttattagttacatatattgtattgagtttaattggattagtgatggtatatagtgcaagtatggttccagcaactaaaggcacattgactggtggtatcgatgttccaggaacgtatttttacaaccgacaattagcatatgtcataatgagttttataattgtattttttattgcatttttaatgaatgttaaattactgagtaatattaaagtgcaaaaaggtatgattataactatcgtctcactattattactgacgttagtaataggtaaagatattaatggttctaaaagttggataaacttaggatttatgaacttacaggcatctgagttattaaaaattgcaatcatattatatatcccatttatgatcagtaaaaaaatgcctagagtattaagtaaaccaaaattaattttaagtcctattgtattagcattaggttgtacgtttttagttttcctacaaaaagacgtagggcaaacattactaatattaattattttagttgcgatcattttttattcaggaattggggtaaacaaagtcctaagatttggtataccagcagtgctaggattcttagtagtatttgtcattgcattaatggctggttggttaccaagttatttaactgccagatttagtacgctaacagatccattccaattcgaatcaggaactggataccatatttccaattcattgcttgcgataggtaacggtggcgtatttggaaaaggattaggaaatagtgcaatgaaattgggctatttaccagaaccacatacagattttatttttgcaattatttgcgaagaattaggtttaatcggaggattgctagttattactttagagttctttattgtatatcgtgccttccagtttgcaaataaaacatcatcatatttttataaacttgtgtgtgttgggattgccacatactttggaagtcaaacgtttgtaaacattggcggtatttcggcaacaattccattaactggtgtgccattgccatttatcagctttggtggatcatcaatgattagtttaagtattgctatgggattacttctgattgtaggtaaacaaatcaaagtagaccagcaacgaaagaaacaacaacaaaaagttgatataagaagacaatttaattaaaaaaatactagccaatatttagtacgagatgacttctgtcattaagcaatgctaaacattggctatttatatactctttgtcaaattggactgatgagttcaataacggaagttaggcaaccaaacaacgcttaacttcctttttgttttgatattacgagattactcatgattatcaaattttataaacaaaacaacgtataattataactaaattttatgactaaaaattactaaatgtggtggcgaaattagaatcatgatgataagataaagttatcgctattgataataaatgttgatgttttgcaattttatttttaattttttagagttgtagaaatcgaaaatgtttcacaacaaaaacgtgaactacctgttgttgcatagtcatttttgaaattattatttctgaagcggaggttttaattgtctcaagaatgttaaattttgaaaatttgaaacataactatagcaaaacagagcgctttaagataaaattttattatctaattagttagaaaattctaatagtttgaggagtgtatcgctattgaaacaaataaaaaagttacttgttgctaaccgtggagaaattgcaattcgtatattcagagcggcggcagaattagacatcagcacagttgcaatttattcgaatgaagacaaaagttcattacatagatataaagcagatgaatcctatttagttggaagtgatttaggtcctgctgaaagttatttaaatattgagcgtatcattgatgtagcaaaacaagcgaatgtggatgcgattcatcctggctatggatttttaagtgaaaatgaacaatttgcgcgtcgttgtgcagaagaaggaattaaatttattggtcctcatttagaacatttagatatgtttggagataaagttaaagctcgtacaacggctatcaaggcagatttaccagttattcctggtacagacggtccaattaaatcatatgaattagcaaaagaatttgcagaagaagctggtttcccgctaatgattaaagccacaagtggtggcggcggtaaaggtatgagaatcgttcgtgaagaaagtgaattagaagatgctttccatagagcaaaatcagaagctgaaaaatcatttggtaatagtgaagtttacatagaaagatacattgataatccaaagcatattgaagtacaagttataggtgacgaacatggaaatatcgtacacttatttgaacgtgattgttcagtacaacgtcgtcatcaaaaagttgtagaagttgcaccatcagttggattatcaccaacattacgtcaacgtatttgtgatgctgcaattcaattgatggaaaatattaaatatgtcaatgcaggtactgttgaatttctagtatctggtgacgaattcttctttatagaagttaaccctcgtgtacaagttgagcatacaattacagagatggtaacaggaattgatattgttaagacacaaattttagttgcagcaggtgccgatttatttggtgaagaaattaatatgccgcaacaaaaagatattacaacattgggctatgccatccaatgtcgtattacaacagaagatccgttaaatgatttcatgccggatactggaacaatcattgcttatcgttcaagcggtggctttggtgtacgtctcgatgctggagatggtttccaaggtgctgagatatcaccttattatgattcattactcgtaaaattatctacacacgcgatatcatttaaacaagcagaagaaaaaatggtacgttcattacgagaaatgcgtattcgtggtgttaaaactaatattccattcttaattaatgtaatgaagaataaaaagttcacaagtggtgattacacaactaaatttattgaagaaacaccagaacttttcgacattcagccgtctctagatagaggtactaaaacattagaatatataggtaatgtaacaattaatggtttcccaaatgttgagaaacgtccgaaaccagactatgaattagcatcaattccaactgtatcttcaagtaaaatcgcttcatttagtggtacgaaacaattgcttgatgaagtaggtccaaaaggtgtagctgaatgggttaaaaagcaggatgatgtcttactaacagatacaacctttagagatgcacaccaatcattattagctacacgagttagaactaaggatatgattaatatcgcatccaaaacagcggacgtatttaaagatggtttctcacttgaaatgtggggcggtgctacatttgatgtggcatataatttcttgaaggaaaacccatgggaacgacttgaacgtctacgtaaagctattccaaatgtattattccaaatgttgttacgtgcttcaaacgcagttggttataaaaactatcctgataatgttattcataaattcgtacaagaaagtgctaaagcaggcatagatgtctttagaattttcgattctttaaactgggtagatcaaatgaaagttgccaatgaagcagtacaagaagcgggcaaaatctctgaaggtactatttgttatacaggtgacattttaaatcctgagcgatcaaacatttatactttagagtattatgtcaaactagctaaagagttagaacgtgaaggtttccatattttagcgattaaagatatggcaggcttattaaaacctaaagccgcttacgaattgattggtgagttaaaatcagctgtagatttaccaattcatcttcacactcatgatacaagtggtaatggtttattaacatacaaacaagcaatagatgctggtgtcgatatcattgatactgctgttgcttcaatgagtggtttaacaagtcagccaagcgccaattcgttatattatgcattaaatggcttcccacgccaccttagaactgatattgaaggtatggagtcacttagtcattattggtcaactgtacgtacttattattcagactttgaaagtgatatcaaatcaccgaatactgaaatttatcaacatgaaatgcctggtggacagtattcgaatttaagtcaacaagctaaaagtttaggtttaggcgaaagatttgatgaagtcaaagatatgtatcgcagagtgaatttcttatttggtgatatcgtaaaagtaactccatcgtctaaagtagttggtgatatggcactttatatggtacaaaatgatcttgatgaacaatccgtgattacagatggctataaattagatttcccagaatcagtagtgtcgttcttcaaaggcgaaataggacaacctgtaaatggttttaataaagatttacaagcggttattttaaaaggccaagaagcactaacagctcgtccaggtgaatatctagagccagttgattttgaaaaagtccgtgagttgcttgaagaagagcaacaaggtcctgttacggagcaagatattattagttatgtattatatccaaaggtatatgaacaatatattcaaactagaaatcaatacggaaacttatcgttacttgatacgcctacattcttctttggaatgcgtaatggtgaaacagtagaaatcgaaatcgataagggtaaacgattaattattaaactagaaacgattagtgaaccagatgaaaatggtaatagaacgatttactatgcgatgaatggtcaagcgagacgtatttacattaaagatgagaatgtgcatacaaatgcgaacgttaagccaaaagcagataagagtaatccaagtcatatcggtgcgcaaatgccaggttcagtaactgaagtcaaggttagtgtaggtgaatctgtgaaagctaaccagccgttgctaattactgaagctatgaaaatggaaacaacaattcaagcaccatttgacggtgtgattaaacaagtaactgtaaataatggtgacacaatagcgacaggcgatttattaatcgaaattgaaaaagcaactgactaaaatgattaaaataaaacgagattacacaacaattgacgtgtaatctcgtttttacatggcttaggtttaattttaaatattgatataaaaaaccgtaattttaatgggcgtgccattaaaattacggtttgcttttttgttattgcttgtcacttcttactgatcgtaacattagcatgataaagtatgttgtcataccaaataaataagtgataaataatgcatggaaaagtgcgattatcaggttaacatttgtcataatagataatgcacctgtgataacttgtaatataacaagtataaatgcagctgtataaccataatgaacagtacggttatttggataatttttaacagcgtgaatataagtaatcataataatcgtaaacactataaaagccatgatacgatgcgtgagttgaacccaatcttgttctgaatgtggtacaagatcgtggaatggcaatggccaaccaccatatgctaaacttgcatccgcatgtctcactagtgcaccagtataaacaccacaataaatgatgattgccattaaccatgttaaacgtcttaatggctttttgatatataattcgtcagcttcatatttttgatctatagagaaaataatcaatgttattaaaaatacagatgagaaactgattaatgatataccaaagtgcaatgctaaaacgtaatcgttttgttgccaaataacagcagcagctccgattaatgcttgcaataataagaatccaacactaatgattgataaaggtttaatttctttaatatagcctatatgtttccatgcagtgataactaaccataagaccattaataaagacaaagctgaaacggctctatgacttaactcaataatcgtatcaataggaaagaattctggaatcaacgcaccatgacatagtggccaagaagaaccacaaccatcagctgatccggttttggtaactaaggctccaccaagttgtacaaatgtcatcattaacgttgctacgacacctaaccattttaaattctttttgccaaacaatttatacaccccatcataaaaaaacgcatcactgagaattagaattaatagccggatttgagatgatactataaattaacctgattgtaggatatgaaaagatgggatccaacgcaggaaatatgatttaattttacaagtattgtatgtggacgacataaaaagaacttaatcgtaatgatttttttattgggataattatgtaatccacgtttactcaaatttgaagcttaaatattaatctcttttagatgcatgattctacttattaaaattttctaacatatacattatagcaataaattaaatgttatttgtgtcacaaaattgacattttctcttgtcgttaatttgtcacattttaattttattaaacctagtctttttatgcaatctaagatatcataatcttatatgaacaaatttaaggagggggattatgagcaaagagcatactttgtcacaaaatattagcagagttaacttcaaagaattgcaacagataattaaaatgggacttgttcaaggtaacttaattccggcttttgcgggcgcatggctagcagttgtaatgacaaatcattccttcttatcatcaatacctcaaattttattaatgctattaggatctactttaattatgggtggcgcatgtgcgttaaataattattacgaccaagatattgatcgtattatgcctagtaaacaaaatagaccaactgtaaataatagaattacagatcaaaatttattactattaagttttggtatgatgttagttggagaaatttgtttgtttttattgaatataccatcaggcgtacttggtcttatggggattgtaggttatgtgtcttattactcaatatggtctaaaagacatacaacatggaacacagtgattgggagttttcctggagcagtaccaccactaattggatgggttgcaattgaaggacaaattagtttaacagcgattgcgctgtttttagttgtattttgttggcaaccaattcatttttatgccttagctattaaacgtaaagatgaatatgcacttgcaaatattccaatgttaccatcagttaagggctttaaacgtacacgtgtcagtatgtttatctggttgattattttattgccagtacctttattactaataaatttaggtgtcgtattcgtagtgttagctacattattaaatttaggatggattgcattaggtttaacaacatttaagaaaaattcagatcaaacaaaatgggcaacacaaatgtttatatattcactaaattatttagtgatctttttcgtgttagctgtgattgtttcattacttactttgatctagattaattaagttaggatgaaaaatatgggcgttccaattttaccaacgattagtacgacatgtattgtcattagtgcaattttaattgccattggttggagacttatttggaaaagggaaataaataaacacaaaaatgttatgttagctgcagctgtttttgctttaacttttttcttaatctatgcaagtagaacgatttttatcggtaatacagcatttggcggaccagcatcaattaagaaatattatacgattttcttatttttccacattaatttagcaacaattggtggtattctaggcctagttcaaattattactgcatttaaagataaatataatgtacaccgcaaattcgggccattcgcttcagttatatggttctgtactgcaattacaggtgtagcagtttacttattattatatgtattatatccaggtggagaaacgacatcactgattaaagcaacatttggtcattaatatgcttatacaaatgatactaatctgataaggcaatttgttttatcaggttttttgatgaagaatagtcggacagttgatggtattcatttgataccttaactgtccatttttttatacatattttaatcttaataatgaaattcaacctgaaaacataaagataggttatgatatagagtgtagggaaaatctttatgacgttaaaattatgcctgaagatgattttgttttatcgaaacgacacagttatgtcagtgttgaaaatttgctaattaatgtgttgttttttacaatagtattaatactttttaggtggttgattgatgaaaaagttaattataagagtcgtcggtgtattatttttagttggatttttaatatatcttttttattcaccgagattaaaatttgatgtattagagaacccgaataaaggtaataaagtaaatagatctgaacaggtgaataaatcaaataaccatgctgaaaatccaaagcctaaagaaggtgttggtacatgggtaggtaaagatattaaagtgcttacttctaaatttggacaagcagatcgtgtctacccttttagagatggttacaaaaattatgtgtttaaagacaaaaacagttattacattgtttcaactaaacgtgaagagatcgtttcagtgtatgctacaggtgagaaagtcaatgttagtccgttaaaaattggacaacattctgcagaaatttttaatcatacaagtattaatccagaaccgtcctttaaagttgatggtaaaaaatatgaatttgaactttcagatgaagatttaaaaacacaaacactgattaaatatggcgacatatatgcacaagtgtattctgatcaacaatcgaaaaaggtgctaagtgtacgatttttaacaaaagaaatgttagcagatattgaaccttatcaattaaattctaattctacgtcagaagagcataataagcgtccagttgagcaaaatccaaatcaattaatttctctttatgaagtaacgaatgaaatgagaaaattaaaaggattaaaaccattgaaaatcaatagcgatttagcacatattgcatctaataacttatatgaagcgacctctaatggttctgatagtgttgaatttacagaggacgcattaagagggcaattagataaaaatcacgttacttataaaacaactgctcaaaatgttggttatgcgtttaatgatgtaccaacattaatccatagttggatgaattcagatatacatcgatctcgtctattaaattcaaaatacgatgagatgggtggagatgtaatgagagattattattcactaattttcttagaaaaataacaatgaggggtatttatgattaatgaagcttcactagcgatattagatgatattgatgaactagctgatatgatagttgcatcagatatttatgcatcatttgagcaagctaaacaggcgctcgaaaacaatgacgaagcacatttactttatcaatcatttttaaaatcaaaagagaaatatgatgaagtaatgcgtttcgggaaatatcatcctgattataagaaagtcatgttagagacaagacaacgcaaaagagcatatgagatgcttgacgttgtgatgcattacaaagctagggaaatggcacttcaacatttaattgatgaagttgttacgaaaattgcgtatgctgtttcagagcatgtcaaaatagaaacaggtaatccattctttcaaacatcacatagtggttgtgcgacgggcggatcctgtaattgttcattataaaaaacatcgagtcagaaaaagatggttattgaaaccactaactagcatctgactcgatgtttttatttgttcgggattgtttgtttgaattgttgtgctaaatctggtcgatctgtcacaatcgtgtgtgcacctttttggtataaatcattcatcagatctatactatttacgccataatagcctggaatgatattcatatcatttaaccatttgataaaacgagatgaagtcaaatcaatgcctttaaaatgagtaggcatttggaacgtttgtgctaatggttggtagtacctaccacctaataaatgatattttaaaaatgcttctgtaacttcctgttggctagcaccaattgcgacggatccttgtgcaattttattaaaacgaacgatttgttctttataaaaacttgtcacaagaacgcggtcaaatgcttgattttctgcaattgtatcaaacataatttgtggtgcgattgagccttcataggattcaggagcatcttttaagtctacgtttatatacatatcaggatattgcttcagcaactcatcgaaggttagtatagctgtgtgtgcatgaccacgatatggtgttagtccattgatatctttgaagtgataagctgcgtctaatttctttaattctgctaatgtatgggcactaacttttccagagccgttcgtcgttctatcaacagttgcgtcatgaaaaacgataagctgttgatcttttgtgagtctcacatctgtttcaaagccatcaacgcctaattgtttagcatagtcaaatgcaagttgcgtttgctctggtcttaaagccataccaccgcgatgcgcaaatatatatggtgcattgcctttgaaaaaagcagggatggtttgctttttagtaatcactttatttttattgatcattaatagactacttaaaaatccagcaccgactagtaccgcatttaaaatgtttctgtttacttttttcatagaaaattcctcctcgtttacttttatagcttaacaaaatcatagttctgactacagcgaaatgtgtggttaatcatatagtgatgctcttgagaattgaattaatataatgatgtttaatataatctaaatacatttatcgagcaattacataagacataattaaggtagcttaatattttaaaattaataaagacatgatatgattaatgctgaaaataaatggagtgaggtttaaatgaatttaatcccaagaactagtattgtagtttatttaaaacatatgaaacatgaacgacaaatccgaaaatatggacatatcgttcattcaaatagagatcgtaaatttgtaattatgtatgtgaatgagcaagatgttgatcaaattgtacataaactaatgcaacttaaatacgttagacacattgatggctcaccatataaatacttaaagaaaacttacgaaaaagagaaacacgaaatatataattaatattattgaagttctggtatccatttttggagccttaacacactaattaaataattataatataacgataaatcatgaaatgcttgagggggctgtacatcgatacctaaaataggtatgtcgaatttttcagcacaatcattaatcatttgaaactttttatttgaatctggatatggatatttaatagcgtttatcatgatataaaatgcttgaaaatgattgccagttgtagggttcataatgattgctacagatgactttttattttcagcttgtggtgaatgaaaatagataattttatcaatacgttgatggttatattcaatcatcgtcatgaattcgaacaaatctgttagaccttcaccaagtgtaataaatgtttgtttcattggtttatcattctcctttttctcaataaattatattaaataactaaatgaattggaagtgtgaacaacatgcgcgtcattgcaggtaaacataaaagtaaagctttagaaagtatagaaggccgtaatacgagaccaactatggataaagttaaagaaggtatctttaatagtttatatgatgtgtcaggtataggtttagatttatttgcaggaagcggggcgcttggaatagaagcactctctcgaggtatggataaggtaatctttgttgatcaaaattttaaagctgtaaaagttattaaatcaaatcttgcgaatttggatttagaggcacaatctgaagtttataaaaataatgcagatagagctttaaaagcattgtcaaaacgtgatattcaatttgatgtcattttcttagatccaccttataataaaggtctcattgataaagctttaaaactaatttcagagtttaatttattgaaagaaaatggtatcatcgtttgtgaatttagcaatcatgaagaaatagattatcaaccgtttaatatgattaaacgttaccattatgggttgacagacacattgttattagaaaagggagaatagcatggaacatacaatagcggtcattccgggtagttttgaccccattacttatggtcatttagacattattgagagaagtacagatagatttgatgaaattcatgtctgtgttcttaaaaatagtaaaaaagaaggtacgtttagtttagaagagcgtatggatttaattgaacaatctgttaaacatttacctaatgtcaaggttcatcaatttagtggtttactagtcgattattgtgaacaagtaggagctaaaacaatcatacgtggtttaagagcagtcagtgattttgaatatgaattacgcttaacttcaatgaataaaaagttgaacaatgaaattgaaacgttatatatgatgtctagtactaattattcatttataagttcaagtattgttaaagaagttgcagcttatcgagcagatatttctgaattcgttccaccttatgttgaaaaggcattgaagaagaaatttaagtaataaaaataacagtattttaggtttatcatggtttacaatcctaaaatactgttttcatttgttaacgatattgctgtatgacaggcgtgttgaaatctgtttgttgttgcccgcttattgcattgtatatgtgtgttgctttgatttcatttgtgaagtaatgtgcattgcttttgttaatattggttatatattgtctttctgggaacgctgtttttaaatgctttaaatattgtctgccacggtcgttcatcgctaatactttaactgcgtgaatgtttctcgtaacatctgtaggtttaatgtttaataatacattcattaacagtctttggatatgcgtatatgtataacgctttgtttttagtaattttacaaaatgatgaaaatcagttgcttcataaatgttagatttcaaacgattttcaaaaccttcagtaacagtataaatattttttaatgaatctgtagtcatagctatgatttgatatttcaaatatggaaatatttgatttaatgttatatgaggtgttacgtacaagtgttgaatatctttaggtaccacatgatgccaatgatcatcttgactaatgattgatgttctaatagatgtaccacttgcaaactgatggtgttgaattaatgaatcatgatgttgagcattttctcgtttgatagaaattgcattgatgtttttagcatttttagcaattgctttcagataactaataccaagtatgttgttaggacttgctagtgcttcatgatgctctaataattcgctaatgatacgagggtagcttttaccttcttttactttttgtgaaaaggattcagattgttcaatttcattaatgctgtgtgctaattgctttaatgttttgatatcattattttcactaccaaatgcaattgtatcgacactcatataatctgcgactttaactgctagttcggcaaaatgatcgccagatgataaactggcagttgctggtagttcgataactaaatcagctgttgataatgccatttttgcacgagtaaacttattatagattgctggttcgccacgcatgacaaagttaccactcattattgcaatagtaacgtcagcatttgtaagttttttagattgattaatatgatattgatgcccattatgaaagggattatattctgtgattaagccaacgcttttcatttgcaattcgtcctttcggtattcattattaatattgtaacagaacatgatatgttaagaaaaaatcttgacaacttgttcttagaaagttaaaataaattttgtgcttgttagaggtgaagccatatgaaatggtcaattacgcaattaaggaaatatcaaggtaagccatttgaatttgatcaaacggtgagttttgacaatttaaaagaatcattagatttaattgatttatctccaattacaatccaaggtcagttaaccattaagtcaacagaagtcgttgcgaatattcacattactggaacgtatacaatgccttgtgcacgtactcttgtaccagttaaagtcccactagatgtaactactacagaagtatttgatttagaagggtacaatcagtataacgatgatcaagatgatgtagatgaacactatcacattattaaagatggtatggttaatcttcaggatattgtcgaggatatagttattattgagaaaccaatgagagcttattcagagcaaagtgaccaaatgttgacagtaggtaatggttgggaagtaatcgatgaggatcaattagatgagcttgctaaacagcaagaacaagatgattcagaatcacgacaagttgatccaaggcttcaaaaattacaacaattatatgataaagagcaataagtagtttaattaatgatataatgttgttaattaaactaacatttagtatttttcgtttataatctaaggaggatatatcatggcagtaccaaaaagaagaacttctaaaactagaaaaaacaaacgtcgtacgcatttcaaaatttcagtaccaggtatgactgaatgcccaaactgtggcgaatacaaattatcacaccgtgtatgtaaaaactgtggttcttacaatggcgaagaagtagcagctaaataattttagttactcaatataaaaagtcccgcttaaaatgattgttttaagtgggacttttttatagtgcaaaaaataattggcgaacgaggtaacaggatacctcatccgccaattaaaatttgttaatttaataattaaatataaagacgattaattagtttttacgttttctaggtaatacgaatgcaacgatgctacttaaagctaataatgccattaatggtaatgtcatatctttatttgattcttcaccagtttgtggtaatgattttgctttattttcttgtgtgtttttattgttttggctttgagtgtgtccatcatttgtgtttttaatgtttgctttttgtaatggagcactatcttttgcttcgctagaacctgctgaagtttgaacaacatcttttgttgtttttgatgaagcagttgttggttttacaacattttgagtcgtagatactaccttagttggagttgtactacttgattctacttcacctttagctggttttgtagcaggcgttttgtctttacctgactcactagatgcgtcattttctttttcaacacttggtaattgtttattgtcatctttttggctgtcttgtttttgtgattctttttcaacaggtgatggtgttggtttgctaggcgtagctggagtagcttccttcttagctgagttatcttgttgttcttttttgttagatttatcggtattggcttttgtaaatgcttctttatcaacgattctgacatggtattgtccatcataatcaatcgtttttacgtgaactttaacgatagcatcatatagagttttaccttcaacatatgggaaaataattgttctagtattatttttagcatctttgcttatagttctaacacgttgaccttcaaccatgaaatctttccagtaatcgtcattagtagtttccatgaccatatattttttgccgttaagcatacctgttttaatagggtgtttaacaaaagtatccatcatagattcgttattctcaacactttcataaacaacatattttgtatcttgtaaatcagtcattttttcatttgttggttgtacattttggaattcagtaatagctgatttcacttgctcatctaaagctttctttgtatcctctaatttcttcttgtactcagcctttaatttttcaggaagtttatcttgaattttatttaattcataaacttgtctttctagtgttttcgcttttttatatggcgctaataatttttcagctttataatcttcttcagttttgaatttatctgcactgttataaattggttgtgcgaattccattaatgtgtaatcgtatttttcttctttgttattgaagtgtgttgaactaacaattttaacagcttttgttccatttgatacagagaagcgaatgtaagcataatctttaacagtatcgtatgatactaatttaattggcaactttttgtcaccttcataaacttcaaattttctccaaaattgacctgattgtaatcctaattcaatttctggttttgaatcagtgaaaataactctagcaggtttaacagaacttgcataatgataaaactgttgagttccatctttctttttcatttcaaaatcaattggacgagagtttggtgcgctatgatctttgtcttttattgcagggtttttaatcgcttctctaagttcctgattcaaaataggatatgtattgttagtggcttttgctgctggtttaacttcttttgtttccttaggggctttaacttctttaacttctttagcttcttttgtttcagaagtaggggcctcaacttctttattagatactgagacagcattagctactggtttagtttctggagctttttcagatgttgttgttggacttgcaactgcttcagtttttggttgtgcttctgtatttgtaccacctgtttcttcagctgcttgtgcttcgccatttgacattaataataaaagtgtactaatcgctacagatgcaacgcctagtgatgactttctaattgaataaaatgatttaaattctttttgctgtttgttcatgttgtagaaacaactcctaattgtatattatcaactgataatcattatcaattgattacttgtattgtacattgaaatggtagttaattgcaacgttattttataaaaaaataacctatgttatagattatgaaatatctatgacataggttaaataaaatttaaaataaaaaatatattaagttatgagtgtgacgatgatttatttagattcttttcttttgaaaagtaataaagataatgaacctaaaagggcaagtgttgcgaaggcaactgtgctaataaagttatcaactgaagttaaaccagtttttggtaattctttagctttagatgcttgtttaggcgtttcgttatgttttgtaactttgttagtttgttgtgatttattatcacttacagcttgattgttgctttcagatttcgctgttgcaacatctttaacaggtgtttgaactttattttgttcttgagcagtttgtgctgttttaactgtatgagcagtttgtgttttagtttgatcttttgttgtgtcagtacttacaactttagtagagtgattgtcttcaactttgcttgttgtagttacagtaggtttaactttttcaactttaggttgaactggtttagtttgctcagtaggtgttttaggttgagctggttttggttgaaccggtttaacattgtttggttttgctgcgtcagctaatgtaggaattgctttttcaaattccaaatgcgtagtatatctatgattgtaattaatttgtggcacgacaatatgtactttagtagttaagctcttatatccaggttcaactgcaacattgattgttctagtatccgcttttttattatcgttaacaacagttgttgctaattcttgattgtttgcattgtaaaatttgtattctttccagaatgatgcattgtttaacacggtttggaaataatatttattattttgtttaattactttaccagggtgttgcatatagtcatccatgtgtgacttctctgaagagccatctttttgcacttggaaattaattggttgtgatgttgcttgagaaacttgtgtgctttgattattagttgcgttcgtagcttctgttgccgcattgacttgttggctgtctgcgcctatgtatacaagggaacctaaaatgatagatgctgtacccattgtaatctttttcatagctgatgaacgttgttctgattgatacttactgtttaaataatgttttgtcatgttgttttcctcctaaggatacaaattatgtgttgttatatgagatgattaaccattgcaattgataatggttatcaattatactagcacatctattttcgtataacaataataaattgattataaaataaatattgacaatgataatcattattatttatgattttactaaagacttaaaagcaatcataaaaaggaggattatgttttgaaaaatattttaaaagtttttaatacaacgattttagcgttaattatcatcatcgcgacattcagtaattctgcaaatgccgcagatagcggtactttgaattatgaggtttacaaatacaataccaatgacacgtcaattgctaatgactattttaataaaccggcaaagtacattaagaaaaatggtaaattgtatgttcaaataactgtcaaccacagtcattggattactggaatgagtatcgaaggacataaagaaaatattattagtaaaaacactgccaaagatgaacgcacttctgaatttgaagtaagtaagttgaacggtaaaatagatggaaaaattgacgtttatatcgatgaaaaagtaaatggtaagccattcaaatatgaccatcattacaacattacatataaatttaatggaccaactgatgtagcaggtgctaatgcaccaggtaaagatgataaaaattctgcttcaggtagtgacaaaggatctgatggaacgactactggtcaaagtgaatctaacagttcgaataaagacaaagtagaaaatccacaaacaaatgctggtacacctgcatatatatatgcaataccagttgcatccttagcattattaatcgcaatcacattgtttgttagaaaaaaatctaaaggcaatgtggaataatgagaaatgttaaacaaattgctacaaaatctattatagctattattagcttaggtatacttacatatacaacaatgattggtagcgtgttggctgatgagataaaatatccatcagccaaatttaatcaacctgaagcaaaagataaaacagaattaactacatcaatttttgatgaaaagataaaagagaataaagcgttagagttactaatttttaatcaagaaaataaaaatgtaactgaggaacaaaaactagttgacgaaaaggcgcaattgatttcagatatgactggtaaaatttacttgcaagtaaagctaaaaggtcaaatagataaagaacaacttgtttttcaaaatgacaaaaatgaagaatttccttttgttataaaagatgaaaaggatgacacaatagtaagaattttaattgaacagcatatggataaaatcaatatgcatgttaaaacgttggctgaaaagaaaaatctagataacaaagaaatggtgtattctattcattttaaagagaaaaaagtacaacatgatgatgcaaaagaagtgccttcaaaacatcaaaatcaagaaaataatcaagatcagcttaaaaaagatattgatgacaaaaaagatagtcaaaaatcagatactaaggaaagacgtactagcctttttactgaaaaaggattaaatgatattcctgtacaaaaagataaagtgcaacaagacagtaataaaaagattgaaaatgagcgacctaaagcatcaggtacattaaaagttgaaaatagccctccaacaataaaaaaggttgaaaataatcacaaagagcaaccgaaacataaagatgaaaaatcaaaaaaggaaaagaaaaaagtagttgaaaaagaaaaagcgttaccagcttttaatagagatgatgatagcaagaatagtagtcaattatctagtgatattaaagaacttgatgaaccaaatcataaaaagcaatatattttatttgcagctggcattgtgttagcaactattttacttatttcggcacatttatacagcagaaagagaggtaaccaagtttgagaatcataaagtatttaaccattttagtgataagcgtcgttatcttaaccagctgtcaatcttccagttctcaagaatcaactaaatccggcgaattcagaatcgtaccaacaactgttgcattgacaatgacattggacaaattggatttaccaattgtcggcaaacccacgtcatataagacattgcctaatcgttataaagatgtaccggaaattggtcaaccaatggagccgaatgttgaagctgttaaaaagttaaaaccaacacatgttttgagtgtgtcaacgattaaagatgaaatgcaaccattttacaaacaattaaatatgaaaggctacttttatgattttgatagtttaaaagggatgcaaaagtcgattacacaattaggtgatcaatttaatcgtaaagcacaagcaaaagaattaaatgaccatttaaattctgttaagcaaaaaattgaaaataaagcagctaaacaaaagaaacatcccaaagtattaatattaatgggtgtaccgggtagctatttagtagcaactgataaatcatatattggtgatttagttaaaatagcaggtggagaaaatgttattaaagtgaaagatcgtcaatatatttcgtctaatactgaaaatttgttgaatatcaatccagatattattttaagattaccacacggaatgcctgaagaagttaagaaaatgtttcaaaaagaatttaaacaaaatgatatttggaaacattttaaagctgtgaaaaataatcatgtttatgacttagaggaagtgccattcggtattacagcaaatgttgatgctgataaggcaatgactcaattatatgatttattttataaggataaaaaatagtgagttgatatgatgataaaaaataaaaagaaactactatttttatgtttgttagtcattttaatcgcaacggcttatatttcgtttgtaaccggtacaattaaattgtcatttaatgacctatttacaaaatttacaactggtagcaatgaagcagtggattcaatcattgatttgcgattgccacgtatattaattgcattaatggttggcgcaatgttagcagtttctggagcattattacaagcagcactacaaaatcctttggcagaggcgaatatcattggcgtttcttcaggtgcacttataatgagagcactttgtatgttgtttattccacaattgtacttttacttaccattattaagttttattggaggtttaataccatttttaataattatattgttgcattctaaattcagattcaatgctgtaagtatgatattagtaggtgttgcgttattcgtattattaaatggtgttttagaaattttaactcaaaaccctttaatgaaaattcctcaaggcttaacaatgaaaatatggagcgacgtatacatattagcagtatcagcattattgggattaatattaacattactattgtcccctaaattgaatttactaaatttagacgacatacaagcgcgaagtatcggttttaatattgatcgttacagatggttaacaggtttattagcagtatttttagcaagtgcaactgttgcgattgttggacaactagcctttttaggtattattgtgccacatgtggttagaaagctagttgggggcaattacagagtacttattccgttttctacagttattggtgcatggctattgttagtggctgatttattaggacgagtgatacagcctcctttagaaattccagccaatgctattttaatgattgtcggtggtccaatgctaatttgcttaatttgtcaaagtcaacgaaatcgaatctaaaacggtacaacaactggtttagtgatgactgaagaaacgtcgttaataaaagaggatttttatgagaatgaagcgatttttaactattgtacaaattttattggttgtaattattatcatttttggttacaaaattgttcaaacatatattgaagacaagcaagaacgcgcaaattatgagaaattacaacaaaaatttcaaatgctgatgagcaaacatcaagcacatgtgagaccacaatttgaatcacttgaaaaaataaataaagacattgttggatggataaaattatcaggaacatcattaaattatccagtactacaaggtaagacaaatcacgattatttaaatttagattttgagcgagaacatcgacgtaaaggtagtatttttatggattttagaaatgaattgaagaatttaaatcataatactattttatacgggcaccatgtcggtgataatacgatgtttgatgtgttagaagattatttaaagcaatcgttttatgaaaaacacaagataattgaatttgacaataaatatggtaaatatcaattgcaagtatttagtgcatataaaactactactaaagataattacatacgtacagattttgaaaatgatcaagattatcaacaatttttagatgagacaaaacgtaaatctgtaattaattcagatgttaatgtaacggtaaaagatagaataatgactttatcaacgtgcgaagatgcatatagtgaaacgacgaaaagaattgttgttgtcgcaaaaataattaaggtaagttaaacagaaaagaggataattatgaaatttatggcagaaaataggctgacgttaacaaaaggaacagcaaaagatattatagaacgattttacacgagacatgggattgaaacattagaaggctttgatggcatgtttgttacacaaactttagaacaagaagattttgatgaagtgaaaattttaacagtttggaaatcaaagcaagcttttacggattggttaaaatctgatgtctttaaagcagcgcataaacatgttagaagtaaaaatgaagatgaaagtagcccgattatcaataacaaagtaattacatatgatataggctatagttacatgaaataattgaatttaaagaggttgcagtacttgttatgacaattggtattgttagcttttgtaacgaccatacatgataccgatgatggtcgtttttttaatgaacacaaacatgctaacaacaaattgctaaaacatagtttgatttgaatgtgctttgaaaataatcatcaattatatcattttgatttattttgaagaagaaaagaattaataatgatattttggggcgtatgatttatagtagtagtatcgataaaagaaatttatgcaatttgaaatattatgagtgataaaagcgattaattaatattaactatacaatcaaatgttttcatcttattaatgattaatatttttatttttaaaaataaagcgaggagctatctatggaacaaattacttctgcacaaaataatagaattaaacaagcgaacaagctaaaaaagaaacgtgagagggataaaactggattagctttaattgaaggtgtgcatttaattgaagaagcttatcaaagtggaattgtaattacacaattatttgcaattgaaccggcaagattagatcagcaaattatcgcatacgcgcaagaagtttttgaaataaacatgaaagttgctgaatctttatcaggtacagtgacaccacaagggtttttcgcaatcattgagaagccgcattatgatatttctaaagcacaacaagtattgctcatcgatcgtgttcaagatcctggaaatttaggcacattaattagaactgcggatgctgctggaatggatgctgtaataatggagaagggtacgacagatccttatcaagataaagtgttgcgagcgagtcaaggtagtgttttccatttgccagttatgatacaagatctcgatacgtttattactcaatttaatggtcctgtttatggtacagcacttgaaaacgcagtggcatacaaagaagttacttcaagtgattcttttgcattactattaggtaatgagggagaaggtgttaatcctgaattattagcacatactacacaaaatttaatcatacctatttatggtaaagctgaaagtttaaatgtagcgattgcaggtagtattttactttatcatttgaaaggttgaccgtgttgaaagttttccgatataattataattaattgtttaacagaacatttctacgtgaatgcatacacaattgaatataaaccaataaaaaggcatggacatttatataaataattgttttagggagaataatcgtgactgcaagttattccaattatttaaagtcttttcacctttttggttacttaaagagatttaagtcggaaagacaatccgttatcaatattaaacaagtgtatgcttaggcataaatttgggtggtaccacggaaatgactttcgtcccttattttttaagaggatgaaagtcttttttagttaaacaacaaatatgataaatagaaaatgaatagttcgaatagggaggtcagtgacatatgtctgaacaacaaacaatgtcagagttaaaacaacaagcgcttgtagatattaatgaagcaaatgatgaacgtgcactgcaagaagttaaagtgaaatacttaggaaaaaaagggtcagttagcggactaatgaaattgatgaaggatttgccgaatgaagagaaacctgcatttggtcaaaaagtgaatgaattgcgtcaaacaattcaaaatgaattagatgaaagacaacagatgttagttaaagagaaattaaataagcaattggctgaagaaacaattgatgtatcattaccaggtcgtcatattgaaatcggttcaaagcatccattaacacgtacaatagaagaaattgaagacttattcttaggtttaggttatgaaattgtgaatggatatgaagttgaacaagatcattataacttcgaaatgctgaatttacctaaatcacatcctgcacgtgatatgcaagatagtttctatattacggatgaaattttattacgtacgcatacatcaccagtgcaggcacgtacgatggaatcacgtcatggtcaaggtccagttaaaattatttgccctggtaaagtgtatcgtcgtgactctgatgatgcgacacatagtcatcaatttacacaaattgaaggattagttgttgataaaaacgttaaaatgagtgatttgaaaggtactttagaattgttagctaagaaattatttggtgctgatcgtgaaattcgtttacgtccaagttacttcccattcactgaaccttctgtagaagttgatgtgtcatgttttaaatgtaaaggaaaaggttgtaatgtgtgtaaacacacaggatggattgaaattttaggtgctggaatggtacatcctaatgtattagaaatggctggttttgattcttcagagtactctggatttgcatttggtatgggaccagaccgtattgcaatgttgaaatatggtatagaagatattcgtcatttctatactaatgatgtgagatttttagatcaatttaaagcggtagaagatagaggtgacatgtaatgttgatatcaaatgaatggttgaaagaatatgtaacaatcgatgattctgtaagtaatttggcagaacgcattacgcgcacaggtattgaagtggatgatttaattgactacacaaaagatatcaaaaatttagttgtcggtttcgttaagtcaaaagagaaacatcctgatgccgataaattaaatgtttgccaagttgatatcggagaagacgaacctgtacaaatcgtatgtggtgcaccgaacgttgatgcaggacaatatgtcattgttgctaaagtaggtggcagattgcctggtggtattaaaattaagcgtgccaaattacgcggtgaacgttcagaaggtatgatttgttcgttacaagaaattggtatttcaagtaactatataccgaaaagttttgaatcaggcatttatgtatttagtgaagcccaagttccaggaacagatgccttacaagctttatatttagatgatcaagtaatggaatttgatttaacgccgaatcgtgctgatgctttaagtatgataggtactgcttatgaagttgcagcattatataatacaaaaatgactaagccagacacaacatcaaatgagcttgagttatctgcaaataatgaactgactgtgacaatagaaaatgaagataaagtaccatattatagtgcacgtgttgttcacgacgtgacaattgaaccctcgccaatttggatgcaagcacgcttaataaaagcgggtatacgtcctattaataatgttgttgacatttcaaattatgtgttattagaatacggtcaaccattgcacatgtttgatcaagatgcgattggttcacaacaaattgttgttcgtcaagctaatgaaggcgaaaaaatgacaacattagatggtacagaacgtgaattattaacgagcgatattgtcattactaatggacaaactccaattgcattagctggtgttatgggtggcgatttttcagaagttaaagaacaaacatcaaatatagtgattgaaggtgctatttttgatccagtttcaattcgtcatacatcaagacgtttaaatttacgcagtgaatcatctagtcgttttgaaaaaggaatagctactgaatttgtagatgaagcagtcgaccgtgcatgttatttattacaaacttatgcaaacggaaaagtgctaaaagatagagtgtcttcaggagaacttggtgcatttattacaccaatcgacatcactgctgataaaattaatcgcactattggatttgatttgtcacaaaatgatattgttactatttttaatcaactagggtttgatacagaaataaatgatgatgttattacagtgcaagtaccatcacgtcgtaaagatattacaattaaagaagatttaattgaagaagttgcacgtatatatggttacgacgatattccatcaacgttacctgtcttcgaaaaagttactagtggtcagctaactgatcgccaatataaaactagaatggttaaagaagtgttagaaggtgctggattagatcaagctattacgtattcgttagtttctaaagaggatgctactgcattttcgatgcaacagcgtcaaacaattgatttattgatgccaatgagtgaagcgcatgcgtcattgcgtcaaagtttattaccacatttaatcgaagcggcatcatataatgtggcacgcaaaaataaagatgtaaaattatttgaaatcggcaatgtcttctttgctaatggagaaggtgaactaccagatcaagttgaatatttaagtggtattttaactggagattatgtagtcaatcaatggcaaggtaagaaagaaacggttgatttctatttagcaaaaggtatcgtggatcgagtatctgaaaagttaaaccttgaatttagttatcgtcgtgctgatattgatggattacatccaggtcgtactgctgaaatcttattagagaataaagttgttggttttattggtgaattacatccaacattagcagctgataatgatttaaaacgtacgtatgtttttgagttgaattttgatgcattaatggctgtgtcggtaggttacattaattaccagccaattccgagattcccaggcatgtctcgtgacattgcattagaagtagatcaaaatattccagcagctgatttattatcaacgattcatgcacacggtggcaatatattaaaagatacacttgtctttgatgtatatcagggcgaacatttagaaaaaggtaaaaaatcaattgcaatacgtttaaattatttagacacagaagaaacattgacagatgagcgcgtttcaaaagtgcaagcggaaattgaagcagcattaattgaacatggtgctgttattagataatgatttaaaccccatgtataaggatatctgaagtagattgatatccctaacatgggggtttatttttgggttcaccaattaggttccaatgcatttaaaaagtcaaagaggaacagcggaatacagatgatgctttgcacaactgcatataaagtcatacttatgagcaaagcaaattagtatgacttacctaataggatttcgtattaggatccaatttatcttgattataaatcaaagaggaacagcggaatacagatgatgctttgcacaactgcatataaagtcatacttataagcaaagcaaattagtatgacttacctaataggaccacctattaggttccgattcataatgattaaaaatcaaagaggaacagcggaatacagatgatgcttcgcatcactgcataaaagcctctaatgattaaaaatcaaagaggctttaaaattttttgggctttttcacgatttttaaaatgcttttttgaaatggtatctaaacgtgaaagaccgtatttttttataatttttgcggcgattacatcgactttagcaccggcacctttaggaatcgtcatattaatattttttgatatttgatccatatatgtaacaaatgcgtatcgagaaattatgcttgccactgcaatggctaatgacttcgattctccttttgtttcaaattttgttttctttggaagtggtatatcggataatgcgtaatggttatacacttcgcgttttgcgaactgatcaatgacgatatagtctaattgagacgaatcaattttttcaagtacatttttgatggcttcattatgaagaacagctttcatttttacttgagtccagccttttgcttgctgaatattatatttttcattgtgtagtgttaataatgaatgtgggatgaaagtaaccaattgctcagcaagttctacaattttggtatcggttaatttttttgaatcatctacacccaaagtttttaaaatagggacatgctctttggtaacgaaagcagcacatacagtcaatggaccaaagtaatcgccacttccagcttcatcactaccaatacagttaaattgatcatacattaaagtttgttcaagaaaagaattagccatatttttctttttagttttattagtattcaattgagaatgctgcggtagaagttctttagacacagcttctgcatgattaccttgaaacatgactttacctgattggtaaatatttacagttgtattttgatactttgcacgtgctttcataccttgaggtaaattctcagtatcaaaagtaatgcgtgacattaatgtcgttatgtctttatccgacaatttaaaaacgatattcgccatttgtgtaaatcctttcatataatttcattatcattagcaaaaataatcatatcataaatgataataacgtcagaaacatttatatatgttgtaaagaattaattgcggatacttacaaaatacatagtggtcatgtataatgtttatgaaaatgttatagtgacacaatttaaacatgataaagtattgaatagaaaattctttacattatttcattataaaaagaacattaagtcatctatagagattgtgttgttgttttatcataattgcaatataacaatattagtatcaaatttagacaaactatccagtcatattttataacgtgaatttagattttaaaaaaaggatcaggagaaattataaatggcacagtttaaaaacaaggtaaatgtatcaattaatgatcagctttttacaattgttggggaagataacccagagcacatacgatatgtagcacatttagttgatgataaaataaaagaattagggtataaagcagcaggtttagatacttcaagaaaagcaatactaactgctgtgaatattatgcatgaaaaagtactactagaagaagaaaatcgacgtttgaaacaacaaattcacaaattgcagcagcgtgagcaataaatggtcattgattttatcataatcattttctttgtgtattttgtcatcgttggattcagacgaggtttttggttatctatgatacatttgagtgcaacgattgtatcattgtggattgccagtcaattttacaaatctattgtagaaagattaattgtatttattccatatcctaaaacaacagcatttaatacaacttttgcgtttcattttaatcatctacaaaatcgatttgaagcgattgtagcttttttaatgattacattgttttgtaagttcattttatatctaattatcgtaacttttgataaaataatagcgtatcaaaacattcatattttcagtcgtgcaatgggaatgatagttggtgtgtttatgacgataattgtcttacactttacgttatatctattggcattatatcctaacgaagcattacaacatcagcttaaaatatctattgtgagtcattcattgatttttcacatcccatatttatcggctttcaccattaatttataaattatcataagaggtcaggacaaaggtatatattaatgatacgtcctggtcttctttttatggagtgttattatgacaaaaaaagatgttatcaaactattagaacaaattgctacttatatggaattaaaaggggaaaatacttttaaaatatcagcgtatcgaaaagcagctcaaagtcttgaattagatgaacgaccattagatgaaatatctgatgtaacggagttaaaaggcattggtaaaggtgttgcagaagtaatcaatgattaccgtgagaccggtgaatctcagtatttacagcaattacaggaagaagttccggaaggtcttattccacttttgaaaattcaaggacttggaagcaagaaaattgctaagctatataaagagttgaatattgttgataaagcgtcacttcaagttgcttgtgaaaatggaaaagttagtgaattaagcggatttgctaagaaaacggaacaaaatatattagaagctgtgaaacaacttggtgctaagaaagatagatatccaattgatcaaatgagaagacttaatcaagaaatcattgattatatagatacattaaattatatcgatcaatattcatctgcaggaagcttccgtcgttttaaagaaatgagcaaagatttagatttcataataagtaccgataacccaaaagcagtgcagcagcaattattaaatattcccaataaagtaaaagaagttgcagtggggaacacaaaagtttcattagaattagcgtatgatgatgaaacgattggtgtcgattttcgattaattgaaccaagtgctttttatcatacattgcagcattttactgggtcaaaagaacataatataagaattcgacaacttgctaaagcacgtgatgaaaaagtaagtgaatatggaattgaacaagctgatggtacattaattcaatatgatagtgaagccaagatatatgaacattttaatgtgaattttataccacctgctatgcgagaagatggtagcgaatttgataaagatctaagtaatatcattacaatagatgatattaatggtgatattcatatgcatacaacgtatagtgatggtgcgttttctattcgagacatggtagaagcaaatatcgcaaaaggttataaattcatggtaattactgatcattcacaaagtttacgtgttgctaatggcttacaagtagaaagacttttaagacaaaacgaagaaattaaggctttagataaagaatatagtgaaattgatatttattcaggtacagaaatggatatattacctgatggctcgctggattatgatgatgaaattttagcacaacttgattatgtaattggagctattcatcaaagctttaaccaatcagaagaacaaattatggaacgattagctaatgcatgtcgcaatccatacgtgcgacatatagcgcatccaacagggcgtattataggtagaagagatggttataaaccgaatattgaacaattaatggcattagctgaagaaacgaatacagtattagaaattaatgccaatccacatcgactggatctgaacgctgatatcgttcgtaaatatccaaatgtgaaattaactattaacactgatgcgcatcatacaaatcatttagattttatgaattatggcgtagcaactgcgcaaaaaggatttgtaacaaaagatagagtgattaacgcattatcgcgtgaagcttttaaagactttattgaaaataatataaaacttaagaaatagagggattttatgagacaaaaaacattagacgtcttagaattcgaaaaaataaaatcactcgttgccaatgaaactattagtgacttaggcttggaaaaggtcaatcaaatgatgccagctactaattttgaaacggttgtttttcaaatggaagaaacggatgagattgctcaaatctataataagcatcgtttaccaagcttgagtggcttatctaaagtatcagcattcattcatcgcgctgatattggcggcgttttaaatgtatcagagcttaacttgataaaaagattaattcaagtacaaaatcaattcaagacattttataatcaattggttgaagaagatgaaggtgttaaatacccaatattagatgacaagatgaatcaattacctgtgttaactgatctttttcaacaaataaatgaaacatgcgatacgtatgatttatatgataatgcgagttatgaattgcaagggattagaagtaaaatttctagcacgaatcaacgtattagacaaaatttggaccgtattgttaaaagccaagcaaatcagaaaaaattatcagatgctattgtaacagttaggaatgaaagaaacgttatacctgtcaaagctgaatatcgacaagattttaatgggattgtacatgatcaatctgcttcaggacaaacattgtatattgagccatcatcagttgttgaaatgaataatcaaattagtcgattacgtcatgacgaagcaattgaaaaagaacgcattttaacgcaactaactggttatgtggctgcggacaaagatgcactacttgtggcagaacaagtcatggggcagttagattttttaatcgcaaaagcgagatatagtagaagtattaaaggaacaaagccgatatttaaagaggaacgtactgtatatttacctaaagcataccatccattattaaatcgtgagactgttgtagctaataccatcgaatttatggaagatattgaaacggtaattattacaggaccgaatacaggtggtaaaactgtaacattaaaaacattaggtttaattattgttatggctcaatcaggattgttgattcccacacttgatggtagtcagttaagtgtatttaaaaatgtatattgcgatatcggagatgaacaatcaatagaacaatcattatcaactttttcatctcatatgacgaatatagttgaaattttaaagcatgcagacaaacatagtttagttttatttgatgaattaggtgcaggtacagatccaagtgaaggtgctgcattagcaatgagcattttagatcatgttagaaaaattggttctctagtaatggcaacgacgcactatcctgaacttaaagcatatagttataatcgagaaggcgttatgaatgcgagtgtagaatttgatgtagatactttgagtccaacgtataagttattaatgggtgtgccgggtcgttcaaatgcttttgacatttctaaaaagttaggtcttagtttgaatattattaataaggctaagacgatgattggtactgatgaaaaagaaataaatgaaatgattgaatcattagagcgtaattataaacgtgtagagacacagaggttagaactggaccgtcttgtaaaagaagcggagcaagtgcatgatgatttatctaagcagtatcaacaattccaaaattatgaaaagtctctaatagaggaagcgaaagaaaaagcaaatcagaagattaaagctgcaacaaaagaagctgacgatattattaaagacttaagacaattgcgtgaacaaaaaggtgcagatgttaaagaacatgaattgattgataagaagaaacgattagatgatcattatgaagcgaaatctataaagcaaaatgtacaaaagcaaaaatacgataaaattgttgctggtgatgaagtaaaagtattatcttacggtcaaaagggtgaagttttagaaattgtcaatgatgaagaagcaattgttcaaatgggaattattaaaatgaagttacctattgaagatttagagaaaaaacaaaaagaaaaagttaagccaacgaaaatggttacacgtcaaaatcgtcaaacaattaaaactgaacttgacttacgaggctatcgttatgaggatgctttaattgaactagatcaatatttagatcaagccgttttaagtaattacgaacaagtttatatcattcatggtaaaggtacaggtgcacttcaaaaaggtgtacaacaacatttgaaaaagcataaaagtgttagtgactttagaggtggtatgccaagcgaaggtgggtttggcgttaccgttgcaacactaaaataaattataatttgataaattaaatagctgcagttaaaataatgtaaagcaacaagaatacatttcaaacatgttatttgaaataagcataaaaattgagcaaatagaaatacatgaagcatgttatctgatataatttgaacatcataataataattaaggaggattggcatttatggcaatcgtaaaagtaacagatgcagatttcgattcaaaagtagaatctggtgtacaattagtagatttttgggcaacatggtgtggtccatgtaaaatgatcgctccggtattagaagaattagcagctgactatgaaggtaaagctgacattttaaaattagatgttgatgaaaatccatcaactgcagctaaatatgaagtgatgagtattccaacattaatcgtctttaaagacggtcaaccagttgataaagttgttggtttccaaccaaaagaaaacttagctgaagttttagataaacatttataagttataaccaatgacgactggggcatttctttaatgaattgctccagtttttgtttgtgtttttaatataaaaagttgaatgataagtcatcatattgtttacgacttgagaatggtgggattaataaatctatgaacgttaaatgataatctagcatgctgatagatttgtagcagttggtttgataaaaccatgttcaatattacatgatgtgcatgaaaagtcatactcgaagatgttgattattaactagaattagtggtgataaatttgaagcacttttgtagcatcattcattttaaaattagaaggggggatatttttggaagactataagcaacgaattaaaaataaattaaatgtcgtacctatggaaccaggctgctatttaatgaaagatcgtaatgatcaagtgatatatgttggcaaagctaaaaagctaagaaatcgattgagatcatattttacgggtgctcatgatgctaaaacaacgagactggttggtgaaatacgtcgttttgagtttattgtcacgtcaagtgaaacagagtcacttttactggaattgaatctgataaaacaatatcaaccaagatataatatattattaaaggatgataaaagttatccatttattaaaattacgaaggagaaatatcctagactactagtgacgagaactgtaaaacaaggtactggcaaatatttcggaccgtatccgaatgcatattctgctcaagaaactaaaaagttattagacagaatatatccatatcgcaaatgtgataagatgccagataaattatgtctttattaccatattggacaatgtttaggaccatgtgtatatgacgttgatttgagtaaatacgcacaaatgacgaaggaaattactgattttctgaatggggaagacaaaacaattttaaaaagtttagaagagcgaatgttaactgcaagtgaatcacttgattttgaacgggctaaagaatatagagatttaattcaacatattcaaaatctgacaaacaaacaaaaaattatgtcatcagataaaacgattcgtgatgtctttggttattgtgttgataaaggatggatgtgtatccaagttttctttatacgacaaggtaatatgataaagcgagatacaacgatgattccattacagcaaacagaagaagaagaattttatacatttattggacaattttatagcttaaaccaacatattttacctaaggaagttcatgtaccacgtaatttggataaagaaatgattcaatctgttgtggacactaaaatcgttcaacccgcgcgaggtcccaaaaaagatatggttgacctagctgcacataacgctaaagtatccttaaataataaatttgaattaatatcacgtgatgagtcaagaacgattaaagctattgaagaacttggaacacaaatgggaattcaaacaccaattagaattgaagcattcgataattctaatattcaaggtgtggatccagtgtcagcaatggttacatttgtcgacggtaaaccagataagaaaaattatagaaagtataaaatcaaaacggttaaaggtccagatgattacaaatcaatgagagaagtagtaagacgacgatattctcgcgttttaaacgaaggattaccattacctgatttaataatagtcgatggtggtaaaggacatatgaacggggttattgatgtgctacaaaacgaattaggtcttgatatccctgttgcaggtttgcagaaaaatgataaacaccaaacatctgaattattatatggcgctagtgcagaaattgtaccactgaagaaaaatagccaggcattttatttgttgcaccgtatccaagatgaggttcacagattcgcaatcacatttcatagacaaacacgtcaaaagacaggcttgaaatcaatacttgatgatatagatggtatcggtaacaaacgtaaaacattattattgcgttcattcggttcaatcaagaaaatgaaggaagctacacttgaagattttaaaaatataggtattcctgaaaacgtcgcaaagaacctacatgaacaattgcataaataaattactgggcgtgagaatcattctcatgccccaaaatatatgaaataatgttacaatatggttaacaaagttatttttttgaatgtacgtggaagcgttttctaaatgagaaagtttatcatcacaagcaattttaaatatcgaatccaaatgttacattgttcgacatgcagtttggtgatcgtgcagtgtgtatttgtctttaaaatgtttcgcttaatgataatgacaacgctagaaacgatatcactttagggggttaagcgtacgtttaatataaatagctcaataaattaaatattcgttcacaggggggactccttttggctcaatcaaaaaatgaattttatctaagacgtattcactcgttattaggtattatcccaataggtgcatttttggtcgttcatttattagtgaatcaccaagcaacacaaggtgctgaagcgtttaataaggcatctaactttatggaatcattaccatttctaattattgtagaatttttatttatatacattccgttgttatatcacggtttgtttggtatacacattgcatttacagcaaaagaaaatgttggacattactcgatttttagaaactggatgttcttcttccaaagagtgagtggtatcttaacatttatctttattggtatccatttatggcaaacacgtttacaaaaagcattttacggcaaagaagtgaattacgatttaatgcacgaaacattgcaacatcctggatgggcaatattttatattatttgtattattgctgttgtgttccactttgcaaatggcttatggtcattcttagttacttggggtggacttcaatctccaaaatcacaacgagtatttacatgggtttcattaatcgtatttttagttatttcgtatattggtgttactgcaattattgcctttatgtaatacatcgcatttaacaaatatagattgaaaatttaggggagtgaaatttttatggcagagaaacatcttattgttgtcggaggtggcctagcgggcttaatgtcaacaattaaagcggcagaaaaaggtgcacatgtagatttgttctcagttgtaccagtaaagcgttcgcactctgtttgtgcccaaggtggcattaatggtgcggtcaatactaaaggggaaggcgattctccttggattcactttgatgatacagtgtatggtggcgacttccttgcaaaccaaccacctgttaaagcgatgacagaggcagcacctaaaattattcatttattagaccgtatgggcgtaatgttcaatagaacaaatgaaggtctattagattttagacgtttcggtggtacattacatcacagaacagcatatgcaggggcaacaactggacaacaattattatatgcattggatgaacaagttcgtgcatttgaagtagatggattagttacgaagtatgaaggatgggaattccttggcatagttaaaggtgacgatgatagtgcaagaggtatcgttgcacaaaatatgacaactgctgagattgaaacatttggttcagatgcagttattatggcaacgggtggccctggtattattttcggtaaaacaacaaactcaatgattaatacaggatcagcggcttccattgtttaccaacaaggcgctatttatgctaatggtgagttcattcaaattcatcctactgcaatccctggtgatgataaactgcgactaatgagtgaatcagcacgtggtgaaggtggacgaatttggacatataaagatggtaagccttggtacttcttagaagagaaatatcctgattatggtaacttagtacctcgtgatatcgcaacgcgtgaaattttcgatgtatgtattaaccaaaaattaggtataaatggcgaaaacatggtatatcttgatttgtcacataaagatccacatgagttagatgtaaaactaggtggtatcattgagatttatgaaaaattcactggtgatgacccacgcaaagtaccaatgaagattttcccagctgttcactattcaatgggtggtctatatgtagattatgatcaaatgacaaatattaaagggttatttgcagctggagaatgtgacttctctcaacatggtggtaaccgcttaggtgccaattcattgttatcagcgatttatggtggtacagtagcaggtccaaacgcgattgattatatttcaaatattgatcgatcatatactgatatggacgaaagtatttttgaaaagcgtaaagctgaagagcaagaacgttttgataaattattagctatgcgcggtacagaaaatgcctataaattacaccgtgaacttggtgaaattatgacagcaaatgtaactgttgttcgtgaaaatgaaaaactgttagaaacagataaaaagattgttgaattgatgaaacgttatgaagatattgatatggaagatactcaaacttggagtaaccaagcggtattctttactcgtcaattatggaacatgttagtacttgcacgtgttattacgattggtgcatataaccgtaacgaatcacgcggtgcccattataaaccagaattcccagagcgtaatgatgaagagtggttaaaaacgacaatggcctcattccaaggcgcatttgaaaaaccacagtttacttatgatgacgtcgatgtgagtttaataccacctcgtaaacgtgattacacaagtaagtctaaagggggtaaaaaataatgactgaacaatcagtgaaaaacactccacaacatgaaacacaatctaaaccgaaacaaaaaacagtaaaattaattattaaacgacaagatacaagtgattctaagccttatgaagaaacatttgaaattccatatcgtgaaaatttaaacgtcattgcttgtttaatggaaattagacgtaacccagttaatattaaaggtgaaaaaacaacacctgttgtctgggatatgaactgcttagaagaagtatgtggagcatgttctatggttatcaatggtcgtgcaagacaatcttgttctgcgattgttgatcaattagaacaacctattcgtttagagccaatgaatactttcccagttatccgtgacttacaagttgatcgttctagaatgttcgataacttaaaacgtatgaaagcatggatcccaattgatggaacgtatgatttaggtccgggaccacgtatgccagagaaaaaacgtcaaacagcttatgaattatctaaatgtatgacatgtggtgtatgtttagaggtttgtcctaatgttactgaaaataataaattcgttggtgcgcaagcaatctcgcaagttcgtttgtttaatttgcacccaacaggatctatgactaaagatgaacgtttaaatgcattaatgggtactggtggcttacagcagtgtggtaattcacaaaactgtgttaatgcttgccctaaaggtattccattaacaacatccattgcagcaatgaacagagaaacaacattccacatgtttaaatcattctttggttcagaccatgaagtagaataaaaattaatcccttttgagttaaaatgttatgttcctttcaaaattaaattgaatggagatacacaataacttggaagggatttttttaataagcagattacatgacaatatgatagtgggctgatttaaaataaatattataatgacaaaaatggtaaacacagtgcataatactaaaatccaatgcttagttatgataaactaaaaattaaattaaaagtaaggatgaccgaatatgaataaaccaataggtgtaatagactctggtgtcggaggtttgacagtagctaaagaaattatgcgtcagttgccaaatgagacgatttattacttaggtgatattggacgatgtccatatgggccaagaccaggagaacaagtaaaacaatatacagttgaaatcgctcgtaaattaatggaatttgatataaaaatgctcgtgattgcttgtaatacagcaactgctgtagctttagaatatttacaaaagaccttatcaatcccagtgattggcgtaattgaaccaggtgctagaacagcaataatgactactagaaatcaaaatgtattagtactaggaacggaaggcacaattaaatctgaagcatatcgtacgcatattaaacgtatcaatccacatgtagaggtacatggcgttgcctgtccaggttttgtgccacttgtagaacaaatgagatatagtgatccaacaattacaagcattgtcattcatcaaacactgaaacgttggcgtaatagtgagtctgatactgtcattttaggatgtacccactatccattgctctataaacctatctatgattattttggtggtaaaaagacagtgatttcgtctggattagaaacggctcgtgaagttagtgcattgctaacatttagtaatgaacatgcaagttatactgaacatccagatcatcgattttttgcaacaggtgatcctactcacattactaacattatcaaagagtggttaaatttatctgtcaatgtggaacgtatatcagtgaatgactaggaggatttttaatgaaagagattgttattgcatcgaataatcaagggaaaataaatgactttaaagtaatatttccagattaccacgtaataggtatttcagaactaataccagattttgatgtggaagaaacaggatcaacatttgaagaaaatgctatattaaaatcagaagctgctgcaaaagcattgaataaaacggtcatagctgatgacagtggactagaagtttttgcattaaatggtgagccaggtatatactctgcacgttatgctggtgaaaataaaagcgatgaagcaaatattgaaaaattattaaataagcttggtaatacaactgatcgtcgtgcgcaatttgtttgtgtcataagtatgagtggccctgatatggaaacaaaagtatttaaaggtactgtttcaggtgaaattgcagatggaaaatatggcgaaaatggtttcggatatgatccgatattttatgtaccgaaattagataaaaccatggctcaactttcaaaagaacaaaaagggcaaattagtcatagacgaaatgcgattaatttacttcaagcttttcttgaaggtgaaaaaaatgtctaaatggattattgtgagtgataaccatactgaatcaggcgttttatatcaaatttatgaaatgcacccagatgcagatgtatatttacatttaggagattcagaattcgcgtatgatgatacggaacttagcttatttaatagagtaaaaggcaattgtgatttttacccagaatttgaaaatgaagcggtcgcaaaatataatgacgtgaaagcattttatactcatggacatttatatcaagtcaatcgaacaagagatttattagctgaaaaaggacttgaattaggttgtttgtttgcattttatggacatacacatgtggcaaaatatgagtatattaatggtgttcatgttattaatcctggaagtatatctcaatctagaagttcaatggaagaaacatatgctgaagttattattgatgatcaaactttacatggcaccatcaatttcaaaaatcgacatcacgaaacaatcagtcatactactttttaaatagaagtagctatggctttttttagtttatagactgatttaactaggaggtcgtgtcatgaatgtttgtttaaaagtatttctgacaattttataagataattggaatgaataacacatttatgttatgaaaagaattgtaattttagagaatgtgattgttgatgaccctatatggttgaatcatgttgattatttggttaaaagtgtattattaaaaagtataaaattaagattccaagaagtcaggaaatttgaaattttagttaaaatcatgattcgtatacatatttaaaaggatttctaaagtcataaattatatcaataatttgatggttaaaatatggagtagcaaaattcttgaaattcagaaatgtagtgacacaaatattaatgtttagttaataaatagttaatgtagttttttgtatctgtctattattataaatatatacaaaataaatatttgaggataggtgttattaattatgaaaaagaattttattgggaaatcaattttaagcatagctgctattagtttaacggtatcaacgtttgccggtgaatctcatgcacaaactaaaaacgctgaaactgtaaaaaaatataacgagtatcaaacaaactttaaaaaacaagtaaataaaaaagtagtggacgcacaaaaagctgtaaacttgttcaaacgtacaagaactgttgcaacacaccgtaaagcacaaagagctgttaacttaattcatttccaacacagctatgaaaagaaaaaattacaaagacaaatcgatctagttttaaaatataatactttaaaataattgatagaagccatgctatagagtgtggctttttgctatattcaaaggtataattagtttataatattgtgttcatttgaatggtgaaattattagaataaatcatataaataattacttaaaagtgaatgcaatagttgtttatgttttgaacaagcgaggtggctattgtgaaaaggaaatcgaatgtattaacaatcataaaaattgtaacggatatagtggcaaccgtgttaatcatacgtgctttattaaacagtcgtaaagatgctaaataaattggaagttacttaaaataaaaaagcacgccaaaacgttagcattgttttctaacgtttggcgtacaactatttaattcagtatgttttttaataccaagtaatcgaatcgatttcgcctttagcgactactttaatattttttctgtgttcttctaatggacgcgtgatatcaaacgtatagtaaccgtttttaccaccatctataattcttactacagctatagtattacctttacctaattttttagcaatgacatataaatcttcaaccgttttacctgtataagttctttctttctcggcgtctttaattaatctatcagcacgttcttcatcttttttctcatcatctgctaactttttagcaatttctaaacctttccattcataactaaagaaagctttagcatcatttgaatgagttagaagacctgtagcgatgactgtagatgcaataattacttttgtaatattttttttcataataagttctccctgtaaaatagatttgtacttactaatgcgagtacactgttattttacaaacggtttcatgcatttaccagttaacacttcattaattaaaattaagtgcaaattaataaggtttaatgcaatcgaaaaagaataatgatgaatttgatggtattatttttatttgaggtattattgaatttgttgatagtataataatagtagtaaacgtcactcaactatgatttaataatttttattgctaaaacgatatttatatttctctacattttgtttgctatgttggatagacaaacactccaaattgttatacatatagcttttttgataattaatgtttataaaacaaagaaatgacacatagtagagaagtaattaatatgtataattttacttataaagaaataagagatatattctaattaaggttgatatgttatgattaatatataagttaaaaattatactatttaattgaattatgcattttcgaagtaagcataattcaacacttacatttttaaatagataaaatagtgtgaaatcacgtgccaagattactatagagtaggcaatgagtattattggcaatcacttaagtgattgttattttttcgtggtcaataataaagatataaataaatatattgaggtcaaacgatgataattaaaattttaacaattctattactactttgtatattgagctatttggttacaaatagaaagaagccttttctgttcttaaaaacactctttatgggtgtggtatttatctttataggatatatttcactggcaatatctgccgtaattatttatggcattattcaatttatcacaattgattttggtagttttttcttaatgggtattatattaatcttgatttcaagtatattccaattatttatagttagattactttttagaaaaaagaatgtcgatttgacagaggttgtcgttttagaacatttaattcaatggttcttagtttactttgcgatctatcaagcagtaaatgaaaaaatggacattaatgatattaatatcgacaattttcaatctgtcttttttgacgtgtctaatttgaatttagtaattctaccaacgttaatcattagctgggtcacaatatttaactatagaatgagaagttacaaataaaatcaatgaaattataccatcagacaccaacattcaaatggtgtcttttttgttatgtggttttatttttgaaattcgaaaaagtagaggcatgaattttttgactagtgtataagtgctgatgagacacaagatagataactatattttgtctatattataaagtgtttatagttaattaataattagttaatttcaaaagttgtataaataggataacttaataaatgtaagataataatttggaggataattaacatgaaaaataaattgatagcaaaatctttattaacaatagcggcaataggtattactacaactacaattgcgtcaacagcagatgcgagcgaaggatacggtccaagagaaaagaaaccagtgagtattaatcacaatatcgtagagtacaatgatggtacttttaaatatcaatctagaccaaaatttaactcaacacctaaatatattaaattcaaacatgactataatattttagaatttaacgatggtacattcgaatatggtgcacgtccacaatttaataaaccagcagcaaaaactgatgcaactattaaaaaagaacaaaaattgattcaagctcaaaatcttgtgagagaatttgaaaaaacacatactgtcagtgcacacagaaaagcacaaaaggcagtcaacttagtttcgtttgaatacaaagttaagaaaatggtcttacaagagcgaattgataatgtattaaaacaaggattagttaaataaaacttcaatcgttgctgttatctggaaataattaattaaatgttatgttaatttttgttaatgaaaaaagtaatctatttaatgacaggttaatgtaattgtcctgaaattgactatatactcagtaagtatcaattttaaggagagcttataatgaaatttaaaaaatatatattaacaggaacattagcattacttttatcatcaactgggatagcaactatagaagggaataaagcagatgcaagtagtctggacaaatatttaactgaaagtcagtttcatgataaacgcatagcagaagaattaagaactttacttaacaaatcgaatgtatatgcattagctgcaggaagcttaaatccatattataaacgtacgattatgatgaatgaatatagagctaaagcggcacttaagaaaaatgatttcgtatcaatggctgatgctaaagttgcattagaaaaaatatacaaagaaattgatgaaattataaatagataataaataaaacaggttgagacaaaaaatggtcttaacctgttttcaatttgcatatgtgataaattctatatcaaaatgcttatgtataatgaatgacatttaaaagtaggggagacaaatataaatacaatagttcctaggattactctcaaaataactatatcaattatttactttgctctcctattttttaaaatatgtacatgtttaaacaatcaaaagtgtacaatattaaattatcatttccagttctagtgctatattggtagtagttgactaaatgaaaataagcttataacaagttttttcaatactcgtggggccacaacagagagaaataggatcaccaattccaacagacaatgcaagttggggtaggacatcgataaagaaatactttttctttagcaattagtatttcttatgcatgagctttactcatgtattcattttttaagtacacattagctacagctaatgataaagaaccactacataataaatcattagtggttctttatcatttctatctcactcttttactggaagaaaaagtttacgtttgtagaacatgccacaataccaaaaataattaagaaaaataagacgataagcatgatgacacttttcaaacaacctctatcagtttctttcgattttctttgttgaaccttttttataatcttcaagtagttttgcggcttttttatttatatgtttattcatgatgttgactccttataatatatgtttaattcattaaaatagttgaaaacatgacttgaaataaagatataaagctaaagtaaggatgttcaattgtttcaaattttatgaaagtataacgttaaatatgttaatttgatgatgatatttgctttttattttccaaatggaatttacttaaactgatgcattaaaatattaatgaagcactagaatacataaatgaatagtaatggtgcacagtatagaataattaaggctatattaagtataaatatcgttaactgtaagctatctttagttttaatataaactattaggataatcgacgtaagaagaatcatatatattaatgatgaagaagtccatacaaaatccgcatcatttgttgttaataatgggactataattaatccgaaattaatcatgcatgctatatatactataatgttatacacaatgttaatttttgttcaccaccttatacttctattttaaaaacttctttataatgatatattgtttaatgttgaaataattagattatctaattttcatttgctttacatgtaaaaggctatatatagtatgctctttatgattctaaatgctttttaatatttaatgctcatcaacatttggatttttaatattcaattcaaaaactttattagctacgtcaattgtaaaatcagaaccatagttgacatgagctacttttaattttccatctaaataatagattgcgattgcaacatcgtaaaattcgtcaatgacaaataaactcttttcgtttgctacaacctcatgctctcctgagtatacaacgttaatttcccaatcattaaaaaccatttgttaacctccttgaacatttaaattgattcaacttaagtttaacttattcatacaacttcgtacaatatctagatgaacattaattgtatttctagaaatctttttcaattatatgtactaattatacttttaaatttcttatttcagtatagttttaaaacgattttaaaataattctgcaaatatattaacacataatgtgttcaaaaagttttgaacaatttcaaaacttttatataaagggtttgacaacatggaattcaaatttcttattttaaaaattacctcatatagtgtcatgtttagtctaatttttaagtcaggaaagcaaatcaagtacatagtttaaattaaaaatatcataagttaattaaactaaattcagtataaaaattagccgaaaaacatcatttctgaagttatcggctaaagttataaattatatttatttgtacatgaacaaataatttacattaatttgtcatttcttctttttcccaatcgattttatatctttctgaagaacgatctgtccatttatctttagtattggtacctttccaatttgttgaagtccaatgcaattggtagtcatcacgaactcgttcgtatattacatctatatttgtttgttgtttggatgcttttctatccatagtaataactgtagcgaagtctggtgaaaaccctgaagataatagagaacttgctttgttaggatcaaggaagttctctgctgctttcatagaaccatttctagttttcatgaaaagttgattgccatataccgggttccaagaatctctatcatatggtccccaattttgattcaccatattgttaaatatcactttccagcctacttttttatcagttgggctctctaaaattgttttgaaatcaggttgaacatatttcagtgtatgaccaatcgaaacatttgcaccaataaggccgccaatttttcctgtatcatcaccagtaacattaccgttgaatccataagttaaagtactcatatactcttttgtatcaatcgaatttcttggatagtaatcagatatttgagctacttcattatcaggtagttgcaactgtaccttaaaggctgaaggccaggctaaaccacttttgttagcaccttcttcgctataaactctatattgaccagcaatggtacctttcgttctaataactagcagttttttattgtgatttttatcatcgataaaactataaaatacttttttgtgcatgccattttctttatcataagtgactaaatcacctgtttttactgtagtattgcttccaatatctgtagtaccggttttaatattaatatcagaatctgcggcattagcgacaggattcattaatatggaacctagcaatagtgttgttgttactgagctgactatacgtgttttcattttcatcatccttctatttttttaaacgatttgaggaaacaataatcaatatgtcaatttagaatattgcagttgagacatatcaaatatttataatcgtttatattagtatatttaatatagcaactgataaattactgagtgatgatgagtgattattttaagaatatgtttttaacttttatttaaaatttgaaaggaagcatttcaatttcgagggttagtcaaagttgaataaattctttatgaaacaaggaaaagacatagctaattctattgattaatttctttaaaactaatgatttgtttgatttaaaaatgtaatcgattacaatataaaaatacaaatatcttagaattaaatcaattaattaactattaaataaaaattaactatatattaactactgtaaattaataaatagaaatagagaaaaagggtattaattatgtttggaatttcgtcgggaataaattttgccattacatagaaatatctaatagataacgaaaaagtatcgtatgtatttttaatatagtgtaaaatattatatgtaaaataaaatgtagatttttagttagaggcattataagaaaattttgagtataggttagcttttaattatgaatcttattgaaatttgattaataaaaatatgataggggattaaaatgaaactattttatatcgtatttcttattattatatggctgaatatatttttaggaaatgaaatcatccatacactgactgttttaataacaacattatatattgttaattcaagaaaggggattaaaaatgacagagttgaataatattataaactctcttcaatctttgtttgagtctgaatcaggctataaaatttcgaaaaattcaggagttccatatcaaacagtacaagatttaagaaatgggaaaaccaaactagaagatgctagatttagaacgattattaaactttatagttactatgtctcattaaaagaacactaatcatgggacaataaagtattgctataataattgaatcattaaatgaaggaatagagcctaaaacataataaatcaatgtcttaggctctacaatattatattggtagtagttgaccgaatggaaatgcccatgtaacaagcatttttcaattataggcggggccccaacacagaagctgacgaaaagtcagcttacaataatgtgcaagttggggagtgacaacgaaataaattttataaaataccatttctgtcacattcctactcccaattccatttaaatatatagaaaatttcacctattatatacatcatacactttaaaaattatcatttaaataatctgatttggaattaaagtgcatgaagtataagtcaccttcatatactaatcaaagaggacgtcaacagttattttattaggatttttaacatatacatttgctagatctgaatgtaatcttttgcttaaatcaatagtgtagttattaccgccaccggtgatcttaagcttacctttattacgattttcgttatataatattttattttttattaacgcttctcgtgcacggaaatcgatttctttcaatgttaatactggtttattgccttggtatattttatgcgcaccaataatcgtttgtagtttatctttgtattgcacaaaaagattataagttttatcagaaggttttgcggctggtgtaacgccacctgtaaatgtctctctataagaccaccataactgatcagtatctttgtcttttagtccaaacacatctacgtaacgatcttttaactgattaatatttccccaactttcagcgccccataaagatatatgtgctgaccatgaatatctcttaagttcaacataaatgtttccattatcatattgatatagccatttatttgaaaatgaaaaatgaggctgtgtgtaatatttaattaattcattgatgttagtttcatcttgaccaatgctataagctttagcttcagagtaaaaactaaatactggtttttgattttgaggtaatactgtacctaatagtaataatgttgtcgttaaaattatatttttcgtgatgttcttacacattagaacatctcctttcagaggaatcatgatacgaggaataagaaatttaaatgtgagcgaagtcaatatagtatttgcgattatttttattaactccattattattgttagtttgatttttcgaggataacttcaatttttgcattttgaggttttttaacatatctatttgcatcagttgatggcaaccttttacttaaatctattgtgtagttattgtctgcacctgttattttaatttgtcctttattataagaattattatataattttttacttttaattaatgtttgacgaatacgaaaatctaattcttttaaagttaaaacaggcttattgccttcataaactggaaatccgccagtaaacgtttctgctttatctttatatgttacattcagtttatagtgtttatcgttagatgttgctgcaggagtaacaccaccagtaaacgtttcttgagataatgcaaaagaatcaatggtttcatggtcttttatgccaaaaatatcaacgcttttatttcttaattggttgatattgccccaactttcaggtccataaacttgaatatgactataccaagaaaactgtaacaacgttgcatgaatcgtaccgttatctttttgccataacgtactgttagagaaggttaaatatttttgcgagtaatatttagttaactcattaacattagtttcgttttgatttatataataagctttcgcttcagatgaagaattgataggtgtattaggaaattgtgtagatgctgtacctaatagtaacaatgttgttgataaaataatttttttcgtgatgttattgttcattcgaatttctcctttgagtattgttggaatgtttaattataaaaaggggttaattagataattgaaattatccgcatttacaaaaggtaataggttagttagatttttcgagtatgacttcaatttgtgcatttttaggatttttaacataacggtttgtgtcagttaattttaactttttacttaaatcaatcgtgtaattatttccatcagcagttatcttaatttgacctttattaaattctccgttatataactttttattttttattaatgtttgacgaatacggaaatctaattcttttaaagttaatactggtttatttcctttgtaaaattcatgtccaccgatgatagtttgttgtttatcactatattttaaaaatagtctataaggcttatcagatgaagtagctgctggcgtaacaccaccagtaaatgtttcatcataagtccagtaaccttcaactgtgtcctcatctttagttccaaatatatcaacgtatttatttcttaactgattaatgtttccccaactctcggatccaaacacttgaatatgactataccaaacccacgtttgcaatgttgcatgaatgctaccattgggcttttgccataaccatttatttgatagtgataaatgaggctgtgtataatactttattaactcattgatattagtctcgttttcactgatattataggcttttgcttcagatgaaaaactgattggtgttttaggaagttgtgtagatgtggttcctaaaagtaacaatgctgttgataaaactaatttattcatgatgttctttttcatatgaaaatctcctttgcgtgaattacccaaagtatataagctattacaccgattcggaattaaataaaagctaaaactatgttaaataaacttaaacagttagtagtgttatttaagcaaaacttatcatttttaagttttggacagaaacagtacttaataaagtaggcgggagttatatattaaaaacgacacgttacaattattctctaatcaattgcattaaattgtttgataattgaattttctaactacttgaaaaatagttatactttaaatgtagtacttattttaattatttcctactacttaaatttaatattaataaaatgttcatttaattattgataaaatattacaaattttaatagtaggttgtgtttattttgtatgcgcttacaatttaggtgtaactaaaataaaaggagttgttattaatgaaaaatttacgaaacagaagttttttaactttattagacttttcacgacaagaggtagaattcttattaacactctccgaagatttaaaacgtgctaaatatattggcactgaaaagcctatgttaaaaaataaaaatattgcactgttatttgaaaaagattctacaagaacgcgatgtgcatttgaagttgcagcgcatgatcaaggtgcaaatgtaacttatttaggcccaactggatcacaaatgggtaaaaaagaaacaactaaagatactgcacgtgtgcttggtggaatgtatgatggcattgaataccgtggtttttcacaaagaacagtagaaactttagctgaatattcaggcgtaccggtgtggaatggtttaactgatgaagatcatcctactcaagttcttgctgatttcttaacagcaaaagaagtcttaaaaaaagattatgcagatattaactttacatatgttggagatggtcgtaataacgttgcaaatgcattaatgcaaggtgctgcaattatgggtatgaacttccatttagtttgtccaaaagaattaaatccaacagatgaattattaaatcgctgtaaaaatattgccgctgaaaatggtggcaacatattaatcacagatgatattgaccaaggtgtaaaaggttcggatgtaatttacactgatgtttgggtatcaatgggtgaacctgatgaagtatggaaagaacgacttgaattattgaaaccatatcaagtaaataaagaaatgatggataaaactggtaatccaaatgttatttttgagcattgcttaccatctttccataatgctgatacgaaaattggtcaacaaatttttgaaaaatatggaattcgagaaatggaagttacagatgaagtattcgaaagtaaagcttcagttgtattccaagaagctgagaacagaatgcatacaatcaaagcagtgatggttgctacattgggtgaattttaaatgatataaggaagtgaatatgatggcgaaaatagtagtagcattaggtggtaatgctttaggaaaatcacctcaagaacaactcgagcttgttaaaaatactgcgaaatcattagtaggattaataacaaaaggacatgagattgttataagtcatggtaatggaccacaggttggaagcattaatttgggacttaactatgctgcagaacataaccaaggtccggcatttccatttgctgaatgtggcgcaatgagtcaagcttacatcggctatcaattacaagaaagcttacaaaatgaattgcattctattggaatggataaacaagtggtaacactagtgacacaagttgaagttgatgaaaatgatccggcatttaacaatccttcaaaaccaattgggttattttacaacaaagaagaagctgaacaaattcaaaaagaaaaaggatttatatttgttgaagatgctggaagaggatatagacgcgttgttccttcaccacaacccatctctattattgaattagagagtattaaaacacttattaaaaatgatacactcgttattgctgctggtggtggaggtataccagtaattagagagcaacatgatggttttaaaggtattgatgcagttatagacaaagataaaacaagtgcgttgttgggtgctaatattcaatgcgatcaattgattattttaacagcaattgattatgtatatattaattttaacactgaaaaccaacagcctttgaaaacaacaaatgttgatgaattaaaacgatatatagacgaaaatcaatttgcaaaaggaagtatgttaccaaaaattgaagcagccatatcatttattgaaaacaatccaaaaggaagtgtgcttataacatcattaaatgaattagatgctgccttagagggtaaagtaggtactgtgattaaaaagtaattgaattgaaacgcttttcaattactatatgtcaaatgcatgatttttattatttatgtgcaccccctgaaaataatgcctctattttgatgcggggtgcactttcttaatttatatttataaaatctttaaggtagaaatgctaggttaaatgtcgaaggagatgaaaccgtggaaaatacaattaatgaaagtgaaaagaaaaaacgatttaaattaaaaatgccaggtgcatttatgattttattcattttaacggttgttgcagttatagcaacatgggttattcctgctggtgcatattctaaactttcttacgaaccttcatcccaagaactaaagatagttaaccctcataaccaagtgaaaaaggttccgggtacgcaacaggaactagacaaaatgggagttaaaattaagattgaacaatttaaatcaggtgcaattaataagccggtatcaattccgaatacttatgaaagattaaagcaacatccagctggaccagaacaaataacaagtagcatggttgaaggtacgatagaagcggtcgatatcatggtattcattcttgtactagggggacttattggcgtagttcaagccagtggttcttttgaatcgggattgttagctttaacgaagaaaacaaaagggcatgaatttatgctaattgtgtttgtatcaatactaatgattatcggcgggacattatgtggtattgaagaagaagctgtagcattctatccgattttagtccctatatttatagcgttaggatacgattctatcgtttcagttggtgccatattccttgccagctctgtcggaagtacattttcaactattaacccgttctcggttgtaattgcctctaatgccgctggtacaacttttacggatggcttgtattggagaataggcgcttgtattgtcggtgcgatttttgttattagttatttatattggtactgtaaaaaaattaaaaaagatcctaaagcgtcatattcttatgaagacaaagatgcttttgaacagcaatggtctgtattaaaagatgacgatagtgcccattttactttgcgtaagaagataatccttacattatttgtactgccatttccaattatggtatggggagttatgacgcaaggttggtggttcccagttatggcttcagcatttttaatatttacaattataataatgtttattgctgggacaggtaaatctggattgggagaaaaaggaactgtagatgcatttgtcaatggtgcatcaagtttagtaggtgtatctttaattattggtttagctcgaggtattaatttagtgttgaatgaaggtatgatttcagatacaatcttacacttttcatcatctttagttcaacatatgagtggaccattatttatcatcgtattactatttattttcttctgtttaggttttatcgtgccatcatcttctggattagcggtattatcaatgcctatctttgcaccactagctgatacagtaggtataccaagattcgtcatcgttacgacatatcaatttggtcaatatgcgatgttattcttagcgccgactggacttgttatggccacactacaaatgttaaacatgcgatattcacattggttccgatttgtatggccggtagttgcttttgtattgattttcggtggcggactactaattacgcaagtactaatttattcataatttgaaatgctatattataaaaatactaaatgggttttatgcatctcgtaggtttgtagaaatactaaactaagcgaggtgcattattatttttgtttaagaaaataatgacggtaatcataacactagtaagtaattgatacaatgctctatttaataatgatatttttaaaatttgtttttaatgtaatgttagatctatggtatattatatttattgtggtaaaaatgtatttgctgtaaacagtttttgtaacacatgatatatatggttgtgaaaatagcatatataaaggatggctataaatgacacatttgacaaaggttttagatacactaactggaatatgcgtagtattattatttagtaaatattttgtggcgtatgcaaatatggtgtttgattggaatttaagatggtatttgctagaaaacataccacatttgccaattatattatttattctgatgtttattttcggagtaccttctgaaatgataaaagataggcaaaggaaaaataacggcgtttaatttatcgatatttagaggtgataaaatttgtcaactattacaaagactaaaataaaaatctttattaattattttattggtatattagccttggcgtttgctgcttatatattatttaaataaaggttagagtgaaacgtgtttatgaactagacgttctagtatagttactacagcttagtcagaaggtatcattgataagatcatattaaatcaaagaggcattgatatacactaaaaagaggcaagattacctgcctcttttttagttattaaatatgcgtgttaattcttggtaatagtgttactgagacgcattacgaagaaatttatcttgattttccttttttaaaaagaagtgaagatatcctataaagactctaagtactattacagtagctaataacacttcgataaacaaaagacctttccaaatgtctggaaacataagtacaggcaaactgttctttaaagcagttgctgagattactaaagggaatgtgaaagctgaaaatacgggcgaaaaaggttcttttagtaatttaggcaattgtataatgatataaaaataaaatatttgagctaatagtaaaaatataattacgataaaagcattcgccttaggaaaggctataacatatgctgcagcgactaaagaaaatggtgcacaaattgtcgatgtgttcggtttgattgacgtctgcaatggaaatgcttttaatcgcttgaaaacaataggtaagacaatacaagtagctacaaagccatatattactgttaattgacctatgaaaaaatatccgctaacgggtgccgtcaatcctgcgatagcaataccaataaaaagtacagtccacgaaggataaacattttcaagtgaaaaatcttttaaatattttattgaaaaaataatcatatgcgtcataattcccacaaggcataaaatccaaataggcgttattaagctattgataaaagttatgttactaaaaaatgtatttaaataagtagtacctaaaaagccagacatgaaaaatgttgtgaacactgatgaaactagaggactgtttaattgttctttcacattattaaaatatttgatcatagtacataaaaggtgaatccaaatcaagaaagcaaagattccgcaaacagcgtttaaagtaagagataagtcttttaatagattacccaggcctaataatcctaagactagtcctgacgttactagaggtgctttttgaagtctcatgatttacaacctttcttatgtgattttcttcactaattatatcatgatagctatggccaattaataagaagagtgtgtactattacgttattagagtatgtatattggattgatagacacataattgacatttaaatctcaaaattaatgatatttgaggtatgctttgcaacctaaatattggaatatgtggaaaagtaattatttaatttaaatgatgattgaagatttacaagggggtgtacaaaatgagaaatcaaattcaaaaactattagacagtgatttgagcagtttacatatatcgaaacaaacaggagttccacaaagcacaatacacagaatgagaaaaaatgaaagatcattagacaatatgtcattgaaaaacgctgaactactttataaatttgccaatagtatatttagcaatgaaaattaagaagaataattagtgagttaaataattaaaacaggctgggacataaatccctaaaaaacagcagtaagataattttcaattagaaaatatcttactgctgttctctatttatacaatacttcgtattgaatggcttcgctttcctagggtgccgtctcagcctcggtcttcgactggcactgctccctcaggagtctcgccattaatactacgtattaacatgtaattttacttttacatactttaaaaaataagacactttgcctaacttgcacataaatgtaaaattcgataaaatgaattttctgtgttgggtcccttcgtataatttaataaataccactaaactaaattaacgaggtgccttatgtataaaaattatagcatgactcaacttacactactaatagaaacttctgttagaattcctcaaaatgatatttcgcgatatgttaatgaaattgttgaaacgatacctgatagcgaattcgatgaattcagacatcatcgtggtgcaacatcctatcatccaaaaatgatattaaaaatcatcttatatgcatatactcaatctgtattttctggtcgaaaaatagagaaattacttcatgacagtattcgaatgatgtggttagctcaaaatcaaacaccttcttataaaactattaatcgttttagagtaaattctaatactgatgcgttaattgaatctttatttattcagttccatagtcaatgtttaaagcaaaatcttattgataataattcaatttttattgatggtacaaaagtagaagctaatgccaatagatatacatttgtgtggaagaaaagtattcaaaatcacgaatcgaaattgaacgaaaattcaaaagcattatatcgtgacttagttgaagaaaaaataataccagagataaaagaagatggagatagcgatttaacaatagaagaaatagatttaattggtagtcatttagataaagaaatcgaagatttaaatcattctattgacaacgaagattgtgctcaaattagaaaacagactcgtaagaaaagaactgagattaagaagttcaaaaagaaatttgatgattattctgaaagaaaaagtaaatatgaagagcaaaaatcgattcttaaagatagaaatagcttttcaaaaactgatcatgatgcaacttttatgagaatgaaggaagaccatatgaaaaatggcaacttaagccaggatacaatttacaaatagcgacaaattctcaatttgttttatcctatgacctatttcaaaacccaacagatactagaactttaattccatttttacaatgattcaaaataccttcggttatttaccagagtatattgtagctgatgcaggttatggtagtgagcaaaactatatggctattatagatgattttaataaaacgtcacttattacgtatggcatgtttattaaagataaaactagaaagtttaaaagtgacatttttaacactcaaaattggaaaaatgacgaacttaatgatgaatttatatgtcctaataacaaaagaataggttttaaaagatatgcataccgtaatgatagatatggttttaaacgagacttcaaactatatgaatgtgatgactgttcatcatgttctttgagacatcaatgcatgaaaccaaattcgaaatccaataagaaaatcatgaagaattataattgggaatactttaaagtccaaattaatcaaaagctttctgaatcagaaacgaaaaaaatctatagtcaaagaaaaattgatgtagagcctgtttttggatttatgaaggctattttgggtttcactcgaatgtcagttcgaggaataaataaagttaaacgagagctaggttttgtattaatggcacttaatataaggaaaatagcagctcaacgagctgtacattataaaatacatatcaaaaaaagctgatttctatcaaataattaatagaaatcagcttttttacattgcctaagaacttaatgtcccaagcccatttttttaaatgtatttaattataggatttcgggcccctgaaaagtccctaaaattttgaatagtatcaaaatctataggaataatataataataaaaatctctacgcatgcaaatggtgagtgttaaaaatcttggtgtagtgttggtgtagttcaggtgcagtatagatgaaatttgagcacaaaattacttaattaaaaatgtataaacaagtgtcagacgcgtgtcaattgtgtgtcaaaaaattctataacgaataagcatgcttgttttaattactgtattttcggggcttatgcgggggacgttttggtgacgcatcatactatattactgaaattcaaaacaaaaagagccccgtaatcacggaactcttttgtttggtaatgcgtataaaaatacctataaacgtcctgggagggattcgaacccccgaccgatggcttagaaggccattgctctatccagctgagctaccaggacacgtttaacaacacaagaattattatatctaaatgaactaaaattagcaataccttgtaaataaaaaatgtttatatttttcactattatagagctatttatctaaaaaggttcaataagacttaaatacgaattcaggcaacttaattgtgttaaatacagttttgaatgcctaactgtatttcttttctctttaaaatacagttaagtacattataagatgttgtgcggataaacaaactaattgcatcaaatttattttaaaataacaacaacaaaacgttaagcgaataacatttcggtgatttaaaagctacgcacgtttttgttatcttcaaatttaaattttaaggagtgttttcaatggaaggtttatttaacgcaattaaagataccgtaactgcagcaattaataatgatggcgcaaaattaggcacaagcattgtgagcatcgttgaaaatggcgtaggtttattaggtaaattattcggattctaatttcaatatgttatgtaagtaatcagtattatttcaaaggtgagggagagatttaaatgactggactagcagaagcaatcgcaaatactgtgcaagctgcacaacaacatgatagtgtgaaattaggcacaagtatcgtagacatcgttgctaacggtgtgggtttactaggtaaattatttggattctaatataataactaatattctttaaaataaactgggtgagcatactttaatgttatgcactcagtttattttatttgcagaaatttgagcctctgttaagatttagatacatagacaatataggagatggggaaattgggatataaaaatattttgatagactttgatgatacaattgttgatttttatgatgcagaagaatgggcgtttcactatatggcgaatgtttttaatcataaagcaacaaaggatgattttttaacatttaaaaaaatcaatcaccaacattgggaagcttttcaacaaaataaattaacgaagtctgaagtattatcagaacgatttgtgaattacttcaaacatcatcaaatggaagttgatgggcatcgtgcagatgtgttatttagaaatggattagcagaagctaaagttaaatactttgatcaaacattagaaacaattgtcgaattatcgaaaagacatgatttatatattgttactaatggtgtaaccgaaacgcaaaagagaaggttaaatcagacgccgttgcataaatatattaaaaagatatttatatctgaggaaacaggatatcaaaaacctaatccggaattttttaattatgtttttaatgatattggtgaggatgaaagacagcactcgattatagttggagattctttaacatctgacattctaggtggaatcaatgcgggtatagctacttgctggtttaattttagaggatttgatcataatccaggaattatacctgattatgaaattaattcatggaaacaactaaatgatattgtacgttaagacaaataatttgaaaatgatttacttatattagcttaagaaagtaattgtaaaaaagacactacgaaaagatgcattttcatgctcgtagtgtcgaatattattatcttatggtttccacaataagacatcatgtccctctatatttttagcttccacatctgtaaatccatgatgtaaaaagaaatccttagaatcatttctgccaatggctttaattggcatattgaaactctttgcaaaatcaatcaattctgaagcgtaccctctgttttgatattttggtaatacttctaacttccataataatatataatcttcaaaatctgggaagtagatttcttcgacatcacctttttttagtaatgccattctagctcctaattgatctccgacaaatatgccataaaatggtgaatctgaacttgcatcaatcatttgaccgtttaactcattgaccatgtataagtctttgttgccaaacgctctaaagttttcgaataattcgtcagttttgtaattaatttcaagacgtttgatttcactcatatttatctaccccttatttgtttactactattattatacattaaaccacttgtgtttttcattgatttgaaaatgtaaaacaatgaatattataaattttccatgattaaattgattttcaagccgtaaaattgtcaatcaccggtatagactttatactatagtttgtaatcgcgtacttaaggagaaaaaacatggactgtaaagtagttagtttaaatgaaaaagatcagtttataccaaaaataaagagcagtgaccctgtaataacaggattatttcaatatgatgcagctcaacaaactagttttgaaaaaaggatgtctaaagaaaataatggaagagaagcggcattagcgaatgttattcgtgaatatatgagtgatttaaagctttctagtgaacaagaattaaacatacaacatttagctaatggttcaaaagttgtgattggtggacaacaagcagggcttttcgggggaccattgtatacattccataaaatattttcaatcattactttatctaaggaattaacggatacacataagcaacaagtagtaccagttttttggattgcaggagaagatcatgatttcgatgaagtgaatcatacatttgtttataacgaaaatcatgggtcgctgcataaggttaaatatcatacaatggagatgccagagacgactgtctctagatattatcctgataaggctgagttgaaacaaactttaaaaacgatgttcattcatatgaaagaaactgttcatacacaaggtctactggagatttgtgacagaattattgaccaatatgactcgtggactgatatgtttaaagcactactgcatgaaacatttaaagcaaatggcgttctatttatagatgcgcagtttgagccgttaagaaaaatggaagcgcctatgtttaaaaagattttgaaaaaacatcagttgcttgatgatgcttttagagcaacacaacaacgtactcaaaatcaaggcttgaatgcgatgatacaaacagatacaaatgttcatttattcttacatgatgaaaatatgcgtcaattagtttcgtatgatggtaagcattttaaattaaataaaacagataagacatatataaaggaagaaattataaatattgcggaaaatcaacctgaattattttctaataatgtagtgacaagaccattaatggaagaatggttatttaacacggtggcatttgttggaggaccgagtgaaattaagtactgggctgaactaaaagatgtatttgaactatttgatgttgaaatgcctatcgtgatgccaaggcttagaattacttatttaaatgaccgtattgaaaaattactttcgaaatacaatattccattagaaaaagtgttagtcgatggtgttgaaggagaaagaagtaagtttattagagaacaagcatcacatcaatttattgaaaaggtagaaggtatgattgaacaacagcgtcgtctaaaccaagacttattagatgaagtggcggggaatcaaaataatattaaccttgtgaataaaaataatgaaattcatatacaacagtataattatttgttaaaacgttatcttttaaacattgaaagagaaaacgacatcagtatgaagcaatttagagaaattcaagaaacactccatccaatgggaggattacaagaaagaatatggaatccacttcaaattttgaatgattttgggacagatgtgttcaagccctccacctatccaccactttcttacacttttgatcatattattataaaaccttaatataccaagggtttagcccgatttatcttaatgataaatcgggcatttttttgttttttaaaataaatttcacaaattttgtataaatagtggtggatagtggggagatgtggtaaattatatataaggtgaggtgataaaaaatgttcatgggagaatacgatcatcaattagatacaaaaggacgtatgattataccgtccaagtttcgttatgacttaaatgagcgttttattatcacaagaggccttgataaatgtttattcggttacactctagacgaatggcaacagattgaagagaaaatgaaaaccttacctatgacaaaaaaagacgcacgtaagtttatgcgtatgttcttctctggtgctgttgaagtagaacttgataagcaagggcgtattaacatccctcaaaacttgaggaaatacgctaatttaactaaagaatgtacagtaatcggtgtttcaaatcgtattgagatttgggatagagaaacttggaatgatttctatgaagaatctgaagaaagtttcgaagatattgctgaagatttaatagattttgatttttaaaatggaggaattgaagtgtttcatcatatcagcgttatgttaaacgaaaccattgattatttaaatgtaaaagaaaatggtgtgtacattgactgtacgctaggtggagcgggacatgccctttatttactaaatcaattaaatgacgacggaagattaatagcaatcgatcaagaccaaactgcaattgataatgctaaagaggtattaaaggatcatttgcataaggtgacttttgttcatagcaacttccgtgaattaactcaaatattaaaagacttaaacattgaaaaagtagatggaatttattacgacttgggtgtttcaagcccacaactcgacattccagaacgaggattcagttatcaccatgacgcaacattagacatgcgtatggaccaaacacaagaactaacagcatatgaaattgttaacaattggtcatatgaagcgttagtgaagattttttatcgttatggcgaggagaaattttcaaaacagatagctcgaagaatcgaagcacatcgtgaacaacaaccaataacaacaacattagaattagttgacattataaaagaaggtattcctgcaaaagcaagaagaaaaggcggacatcctgcaaaacgagtatttcaagcactacgaattgcagtaaacgatgaattgtcagcttttgaagattcaatagaacaagcgattgaattagtgaaagtagacggcaggatttcggtaatcactttccattctttagaagatcgtttatgtaaacaggtgttccaagaatatgaaaaaggtccagaggtaccaagaggattgccagttataccagaagcatatacacctaagttaaagcgtgttaatcgtaaaccgattaccgctacagaagaagatttagatgacaataacagagcacgaagcgcgaaattacgtgtagctgaaatacttaaataaggagcaatttataatggctgtagaaaaagtgtaccaaccatatgacgaacaagtttataatagtataccgaagcaacaaccacaaactaagcccgaaaagaagactgtttcgagaaaagtggttgtacaattaactaaatttgaaaaagttttatacataactttgattactgtaattgctatgttaagtatttatatgctatctttaaaaatggatgcgtatgatacgcgaggaaagattgcagatttagattataaaatagataaacaatcaagtgaaaacagtgctttacaatctgaaatcaaaaagaattcttcttatgaacgcatatacgaaaaggctaagaaacaggggatgagccttgagaacgataatgtaaaggtagtgcgtagtaatggcgaagcaaaaaattaaaattaaaaaaataaaataggggcagtcctacttgttggtttattcggactgctcttttttatattggttttaagaatttcatatatcatgattactggacattctaatggtcaagatttagtcatgaaggcaaatgaaaagtatttagttaagaatgcacaacaaccagaacgaggaaagatatatgatcgtaatggtaaagtgctagcagaagatgtagaaagatataaacttgttgcagtaatagataaaaaggcgagtgccaattctaaaaaacctaggcatgtagttgataaaaaagagactgcaaagaaattatctacagtcattgatatgaagccagaggaaattgaaaagagacttagtcaaaagaaagctttccaaattgaatttggacgcaaaggaacaaatttaacgtatcaggacaaattgaaaatagagaaaatgaatttgcctggtatttctttattgcctgaaacagaacgcttttatccaaatggcaattttgcatcacacttaattggtagagctcagaaaaatccggatactggtgaacttaaaggtgcacttggagttgaaaagatttttgatagttatttaagtggatctaaaggatcattgagatatattcatgatatttggggatatatcgcaccaaatactaaaaaagagaagcagcctaaacgtggtgatgatgtccatttaacaatcgattcaaatattcaagtatttgttgaagaagctttagatggcatggttgaaagataccagccgaaagatttatttgcggttgtcatggatgccaaaactggagaaattttagcatacagtcagcgaccaacatttaatcctgaaactggtaaagactttggtaaaaagtgggcaaatgacctttatcaaaacacatacgagcctggatcaacatttaaatcatatgggttagcagctgctattcaagaaggtgcttttgatcctgataagaaatataaatctggacatagagatattatgggttcacgtatttcagactggaatagagtcggttggggtgaaatcccaatgtcactcggatttacttattcatctaatacattgatgatgcatttacaagatttagttggtgcagacaaaatgaaatcttggtatgaacgatttggatttggaaaatcaactaaaggtatgtttgatggagaagcacctggtcaaattggatggagtaatgagttgcaacaaaaaacgtcatcatttggtcaatcgacaacagtaacacctgttcaaatgttacaggcgcaatcagcgttctttaatgatggtaatatgttaaaaccatggtttgtgaatagcgttgaaaatcctgttagtaaaagacaattttataaaggtcaaaaacaaatcgcaggcaaaccaataacaaaagatactgctgaaaaagttgaaaagcaattggatttagttgtgaatagtaagaagagtcacgctgcaaactatcgtattgatggttatgaggtcgaaggtaagactggtacagcacaagtcgctgcacctaatggtggtggatacgttaaaggtccaaacccatattttgtaagttttatgggtgacgcaccgaagaaaaatcctaaagttattgtatacgctggtatgagcttggcacaaaaaaatgaccaagaagcttatgaattaggtgttagtaaagcgtttaaaccaataatggaaaatactttgaaatatttaaatgtaggtaaatcaaaagatgacacatctaatgcagagtatagtaaagtgccagatgttgaaggtcaagacaaacaaaaagctattgataatgtgagtgcaaaatcattagaaccagttactatcggttctggcacacaaataaaagcacaatctataaaagcagggaataaagtcttacctcatagtaaagtactgttattaacagacggagacttaactatgcctgacatgtcaggatggacgaaagaagatgtcattgcttttgaaaacctaacaaatattaaagtaaatttaaaaggtagcggttttgtgtcccaccaatcaattagtaagggacaaaaacttactgaaaaagataaaatagacgtagaattttcatcagagaatgtagacagcaattcgacgaataattctgattcaaattcagatgataagaagaaatctgacagtaaaactgacaaggataagtcggactaacaagaatggctacattaaataagggtgtattgtcactatttgtttttactaaagtaatgctgtgatagaaaaaaacatcttcatttaatctttataaataagtgttgatagagaattttaaggtagacgaggtcagattaacttgtttgttataggcaaactttttatactggcctcttatgccgtaaaaaagaaaaattataaattttgattacaactttgtttatttaattgaaaaattgataatatattagtggttaaaaaagtctggattaagaagaggagatagttatgatttttgtatatgcgttattagcgctagtgattacatttgttttggtacctgttttaatacctacattaaaaaggatgaaatttggtcaaagtattcgagaagaaggtccacaaagccatatgaagaagactggtacaccaacgatgggtggactaacatttctattaagtattgtgataacgtctttggtggctattatatttgtagatcaagctaatccaatcatactgttattatttgtgacgattggttttgggttaattggttttatagatgattatattattgttgttaaaaagaataaccaaggtttaacaagtaaacagaagtttttggcgcaaattggtattgcgattattttctttgttttaagtaatgtgtttcatttggtgaatttttctacgagcatacatattccatttacgaatgtagcaatcccactatcatttgcatatgttattttcattgttttttggcaagtaggtttttctaatgcggtaaatttaacagatggtttagatggattagcaactggactgtcaattatcggatttacaatgtatgccatcatgagctttgtgttaggagaaacggcaattggtattttctgtatcattatgttgtttgcacttttaggatttttaccatataacattaaccctgctaaagtgtttatgggagatacaggtagcttagctttaggtggtatatttgctacgatttcaatcatgcttaatcaggaattatcattaatttttataggtttagtattcgtaattgaaacattatctgttatgttacaagtcgctagctttaaattgactggaaagcgtatatttaaaatgagtccgattcatcatcattttgaattgataggatggagcgaatggaaagtagttacagtattttgggctgttggtctgatttcaggtttaatcggtttatggattggagtgcattaagatgcttaattatacagggttagaaaataaaaatgtattagtcgtcggtttggcaaaaagtggttatgaagcagctaaattattaagtaaattaggtgcgaatgtgactgtcaatgatgggaaagacttatcgcaagatgctcatgcaaaagatttagaatctatgggtatttctgttgtaagtggaagtcatccattaacattgcttgataataatccaataattgttaaaaatcctggaataccttatacagtatctattattgatgaagcagtgaaacgaggtttgaaaattttaacagaagttgagttaagttatctaatctctgaagcaccaatcatagctgtaacgggtacaaatggtaaaacgacagttacttctctaattggagatatgtttaaaaaaagtcgcttaactggaagattatccggcaatattggttatgttgcatctaaagtagcacaagaagtaaagcctacagattatttagttacagagttgtcgtcattccagttacttggaatcgaaaagtataaaccacacattgctataattactaacatttattcggcgcatctagattaccatgaaaatttagaaaactatcaaaatgctaaaaagcaaatatataaaaatcaaacggaagaagattatttgatttgtaattatcatcaaagacaagtgatagagtcggaagaattaaaagctaagacattgtatttctcaactcaacaagaagttgatggtatttatattaaagatggttttatcgtttataaaggtgttcgtattattaacactgaagatctagtattgcctggtgaacataatttagaaaatatattagcagctgtgcttgcttgtattttagctggtgtacctattaaagcaattattgatagtttaactacattttcaggaatagagcatagattgcaatatgttggtactaatagaactaataaatattataatgattccaaagcaacaaacacgctagcaacacagtttgccttaaattcatttaatcaaccaatcatttggttatgtggtggtttggatcgagggaatgaatttgacgaactcattccttatatggaaaatgttcgcgcgatggttgtattcggacaaacgaaagctaagtttgctaaactaggtaatagtcaagggaaatcggtcattgaagcgaacaatgtcgaagacgctgttgataaagtacaagatattatagaaccaaatgatgttgtattattgtcacctgcttgtgcgagttgggatcaatatagtacttttgaagagcgtggagagaaatttattgaaagattccgtgcccatttaccatcttattaaagggtgtgagtattgatggatgataaaacgaagaacgatcaacaagaatcaaatgaagataaagatgaattagaattatttacgaggaatacatctaagaaaagacggcaaagaaaaaggtcaaaggctacacatttttctaatcaaaataaagatgatacatctcaacaagctgattttgatgaagaaatttacttgataaataaagacttcaaaaaagaagaaagcaatgatgaaaataatggttctgcttctagtcatgcgaatgataataatatcgatgattctacagactctaatattgaaaatgaggattatagatataatcaagaaattgacgaccaaaatgaatcgaatggaattgcagtcggcaacgaacaacctcaatcagctcctaaagaacaaaatagcgactcgaatgatgaggaaacagtaacgaaaaaagaacgaaaaagtaaagtaacacaattaaagccattaacacttgaagaaaagcggaagttaagacgtaagcgacaaaaacgaatccaatacagtgttattacaatattagtattgttgattgctgttatattaatttacatgttttcaccacttagtaaaattgcgcatgtaaatataaatggaaataatcacgttagtacttcaaagataaacaaagttttaggtgttaaaaatgattcgaggatgtatacgtttagtaaaaaaaatgctattaatgatctcgaagaggatccattaatcaaaagtgttgagatacacaagcaattaccaaacacattaaacgtagatatcacagaaaatgaaattattgctttagtgaaatataaaggtaaatatttacctttattagaaaatggtaaattgcttaaaggttcaaatgatgtcaaaattaatgatgcacctgtcatggatggtttcaaaggtacaaaagaagatgatatgattaaggcgttatctgaaatgacacctgaagttagacgatatattgccgaagtgacatacgccccaagtaaaaacaaacaaagcagaattgaattgtttacgacagatggacttcaagtaatcggtgatatttcgacgatatctaagaaaatgaaatattatccgcagatgtcacaatcattatcaagggatagttcgggtaaactaaaaacaagaggctatattgatttatcagtcggtgcttcatttatcccataccgtggaaacacgtctagtcaatcagaaagcgataaaaatgtgactaaatcatctcaagaggaaaatcaagcaaaagaagaattacaaagcgttttaaacaaaattaacaaacaatcaagtaagaataattaaaaaattttgatattgtctatgtttatagttcacaagccattcaacgtattgtaaactaaggatagtgtatttttttaatagtaatttgtcaggaggtgcctatctatggaagaacattactacgtaagtattgatattggatcatcaagcgtaaaaacaatagtaggcgagaaatttcacaatggtataaatgtgataggtacaggacaaacctacacgagcggtataaaaaatggtttaattgatgattttgatattgcgcgacaagcaatcaaagacacaattaaaaaggcatcaatcgcttcgggtgttgatattaaagaagttttcctgaaattacctatcattggaacggaagtttatgatgaatcaaatgaaatcgacttttatgaggatacagaaatcaacggttcacatatcgaaaaagtattagaaggtattagagaaaaaaatgatgtgcaagaaacagaagtaattaatgtgttcccgattcgttttatagtcgataaagaaaatgaggtttcagaccctaaagaattaattgccagacattcattaaaggttgaagcaggcgtaattgctattcaaaaatcgattttaattaatatgattaaatgcgtagaagcatgtggtgttgatgtattagatgtttactctgatgcatataactatggttcaatcctaacagctactgaaaaagagttaggtgcatgtgtcattgatattggtgaagacgttacgcaagttgctttttatgaacgcggtgaattagtagatgctgattctatcgaaatggcagggcgtgatattacagacgatattgcacaaggattaaacacttcttatgaaactgctgaaaaagttaaacaccaatatggtcatgcattctatgattctgcttcagatcaagatatcttcactgttgaacaggttgatagtgatgaaacagtacagtatactcaaaaagatttgagtgactttattgaagcgcgtgtagaagaaatattcttcgaagtatttgatgttttacaagatttaggattaacaaaagtaaatggtgggtttattgtaactggtggatctgcaaacttacttggcgtaaaagaattattatcagatatggtaagtgaaaaagttagaattcacacgccatcacaaatgggaattagaaaacctgaattttcttcagcaatttctacaatttctagtagtatcgcttttgatgagttattagattatgttacaattaattatcatgataatgaagaaactgaagaagatgttattgatgtgaaagacaaagataacgaatctaaattaggcggatttgattggtttaaacgtaaaacaaacaaaaaagatactcatgaaaatgaagtagagtcaacagatgaagaaatttatcaatcagaagataatcatcaggaacataaacagaatcatgaacatgttcaagacaaagataaagataaagaagaaagtaaattcaaaaaactaatgaaatctctatttgaatgattattggccaataaaactaggaggaaatttaaatgttagaatttgaacaaggatttaatcatttagcgactttaaaggtcattggtgtaggtggtggcggtaacaacgccgtaaaccgaatgattgaccacggaatgaataatgttgaatttatcgctatcaacacagacggtcaagctttaaacttatctaaagctgaatctaaaatccaaatcggtgaaaaattaacacgtggtttaggagcaggagctaaccctgaaatcggtaaaaaagctgcagaggaatctcgtgaacaaattgaagatgcaatccaaggtgcagacatggtatttgttacttctggtatgggtggcggaactggtactggtgcagcaccagtcgttgctaaaattgcaaaagaaatgggcgcattaactgttggtgttgtaactcgtccatttagttttgaaggacgtaaacgtcaaactcaagctgctgctggagtagaagctatgaaagctgcagtagatacattaatcgttataccaaatgaccgtttattagatatcgttgacaaatctacgccaatgatggaagcatttaaagaagctgacaacgtgttacgccaaggtgtacaaggtatctcagacttaatcgctgtttctggtgaagtaaacttagactttgcagacgttaagacaattatgtctaaccaaggttctgcattaatgggtattggtgtttcttctggtgaaaatagagcggtagaagctgctaaaaaagcaatctcttctccattacttgaaacatctatcgttggtgcacaaggtgtgcttatgaatattactggtggcgagtcattgtcattatttgaagcacaagaggctgctgatattgtccaagatgctgcagatgaagacgttaatatgattttcggtacagttattaatcctgaattacaagatgagattgttgtaacagttattgcaactggttttgatgacaaaccaacatcacatggtcgtaaatctggtagcactggattcggaacaagcgtaaatacttctagcaatgcaacttctaaagatgaatcattcacttcaaattcatcaaatgcacaagcaactgatagtgtaagtgaaagaacacatacaactaaagaagatgatattcctagcttcattagaaatagagaagaaagacgttcaagaagaacaagacgttaatcggttaatatatatacacaaataattcaacacaaatcatcagataacatatctgatgatttttttactaatttttagaacatgtagaaggacatttaagtttttcgaagttaataaaagtgtttaagtatcgtgtcaaaattaaatcaaaaattatttgcgcaacattttaactttaaacataaatgttatattatataattattaactttgtacagttagacgaagataatttaaatgaaatgatggtgacgatcgagtgaatgataattttaaaaagcaaccgcatcatttaatatatgaagaattattacaacaaggtattactctaggtattacaactagaggcgatggtttaagtgactatcctaaaaatgcttttaatatggcgagatatattgatgatcgcccatataatattactcaacatcaattgcaattagctgaagaaattgcgtttgatagaaaaaattgggtgtttcccatccaaacacatgaaaataaagtcgcttgtattacaaaggatgatataggcacaaatatagacactttaactgatgcgcttcatggtattgatgcgatgtacacatatgatagtaatgtcttattaacgatgtgttatgcagactgtgtaccagtatatttttatagtacaaaacatcattttattgcattggcgcatgcaggttggcgtggtacctatactgaaattgtaaaagaagtgctcaaacatgtgaactttgatttgaaagacttacatgtcgttattggaccatctacatcatcaagttatgaaattaatgatgatattaaaagtaaatttgaaacattgccaattgatagtgcaaactatattgaaactagaggacgagatcgtcatggtattgatttgaaaaaagccaatgctgcattattaaattattatggtgttcctaaagaaaatatttatacgacagcgtatgctacatctgaacatttagaattatttttctcttatcgattagaaaaaggtcaaacaggacgcatgttagcattcattggtcaacagtaaacaaggaggagatatgcttgcgtgtgaaagataatttacaacaaatctcaacacaaattaatgacaaaagtgaaaaaaataatttttcaacaaaaccaaacgtgattgcagttacaaaatatgttacaatagagcgagctaaagaagcgtatgaggctggaataagacattttggtgagaatagattggaaggcttttttcaaaagaaagaagcattaccatcagatgcggtgatccattttataggatcattacaatctcgaaaagttaagggcgttataaacgacgtagattatttccatgctttagatcgattgagcttagccaaagaaattaacaaacgtgcagaacataaaattaaatgtttcttgcaagtgaacgtttcgggagaagcttctaaacatggtattgctttagaagatgttgatcagtttatagatgatcttaaaaaatatgacaaaatcgaaattgtaggtttaatgacgatggcaccattgacagatgatgaagcatatattagatcgttatttaaacagttacgaatgaaaaaagaagaaatacaacgactcaatttagaatatgcgccttgtgatgaattatcaatgggaatgagtaatgactatcttattgcagttgaagaaggtgcgacgtttgttagaattgggactaaacttgtaggagaagaggagtgagccacttggctttaaaagatttatttagtggattttttgtaatagatgatgaagaggaagtagaagtacctgacaaacaacaacaggtaaatgaagcgccagcaaaagagcagtcacaacaaacaacaaaacaaaacgcaatcaaatcagtccctcaaaaatctgcatcaagatatacaacaacgtcagaagaaaggaataaccgtatgtctaattattcaaaaaataattcacgtaatgttgtaactatgaacaatgctacaccaaacaatgcatcacaagaaagttcaaaaatgtgtttattcgaaccacgtgttttttcagatacacaagatattgctgatgagcttaaaaaccgccgtgcgacacttgtcaatttacaacgtattgataaagtatcagcgaaaagaattattgattttttaagcggtactgtttatgcaatcggtggagatatccaacgtgtaggtactgatattttcttatgtacgcctgataatgtggaagtagctggaagcattacagaccatattgaaaatatggaacattcattcgactaaggagttaacatatggatataaatgtgctagctacaatatttaaatttatcctttttgttgttgaaatttattatttcggcatgattatatatttctttacatcttgggtaccaagtattagagaaactaaggtaggttattttttagcgaaaatatatgaacctttcttacaaccatttagaaaagtaattccacctattggaattatcgacatatcatcaatcgctgcaattatcgttttagtattattccaaaaagggttactccaaatctttaattggattttaattcaattacaataaattaagcgacataacgaggcaagggtacatgatactttagcctcgtttttgatatgtatttttctgaatataagggcaatagatggtattttataatttttttaaggtagtgattaacatagatatttatcaacactttagacaggaagaatacgaattaattgatcagctaacggataaatgtgatcaagcggaacagcattatgcaccagtattaacgcattttttagatccaagagggcaatatatattggaagtgatttgtggcagttatgaagatttaaacgtatctttttatggtggacctaatgctgaaagaaaaagagcaatcatttcgccgaactattatgaacctaaagaaagcgactttgaattaactttaatggaaatagattatcctgaaaaattcgtcactttaaaacatcaacatattttagggacattaatgtctttaggtatcgaacgcgaacaagttggagatataattgtgaatgaacgaattcaatttgttttgacaagtagattggaatcatttattatgttagaattacaacgtattaaaggcgcatcagttaaactttatactattccagtaacagatatgatacaatctaatgagaattggaaaaatgaaagtgcaacagttagttctttaaggttagatgttgttattaaagaaatgatacgtaaatcacgtacgattgcgaaacaactaatcgaaaaaaaacgtgttaaagtgaatcacactattgttgattcagctgattttcaattacaagcaaatgatttaatatccatccaaggttttggtagagcacacattactgacttaggtggtaaaactaaaaaagataaaacgcacattacctatagaacattattcaaatagtaatgatttaaggaggataacaaatgccttttacaccaaatgaaattaagaataaagagttttcacgtgtaaagaatggtttagaacctactgaagttgctaattttttggagcaactaagcactgaaattgaacgtcttaaagaagataaaaaacaacttgaaaaagtaatcgaagagagagatactaatattaagtcttatcaagacgtgcatcaatctgtaagtgatgctttgatacaagctcaaaaagctggtgaagaaactaagcaagctgcagagaaacaagctgaagcgattatagctaaggcagaagcgcaagctaatcaaatggttggtgacgcggtagaaaaagcacgccgtttagcattccagactgaagatatgaaacgtcaatcaaaagtatttagatcgcgtttccgtatgttagttgaagcacaattagacttattaaaaaacgaagattgggattacttgttgaattatgatttagacgctgaacaagtgacgcttgaaaatattcatcatttgcatgaaaatgatttaaagccagatgaagttgcagcaaatgcacaaaataatgcatcaaatacatcagacaataatcaacaatccaatgattcagaaacaactaagaagtaagaattaaataaagacagacgcgtaatatacatttaacttttcacagcgaattaggtaatggtgagagcctagtaaaagcatgtatgttatatcactggctttttaatatttaaataatgtaatgagagaactctaagttgagttaataagggtggtaccgcgagcaatcgtcccttttaatttaacttagagttttttaaatttttaaggagtgaaaaaaatggattacaaagaaacgttattaatgcctaaaacagatttcccaatgcgaggtggtttaccaaacaaggagccgcaaattcaagaaaaatgggatgcagaagatcaataccataaagccttagaaaaaaataaaggtaacgaaacattcattttacatgatggcccaccatacgcgaatggtaacttacatatgggacatgccttgaacaaaattttaaaagactttattgtacgttataaaactatgcaagggttctatgcaccatacgtaccaggttgggatacacatggtttaccaattgaacaagcattaacgaaaaaaggtgttgaccgtaagaaaatgtcaacagctgaattccgtgagaaatgtaaagaatttgctttagaacaaattgaattacagaaaaaagattttagacgtttaggtgttcgtggtgactttaatgatccatatattacattaaaacctgaatacgaagctgtacaaattcgtatttttggagaaatggcagataaaggtttaatttataaaggtaaaaagccagtttattggtctccttcaagtgagtcttcattagcagaagcagaaattgaatatcacgataaacgttcggcatcaatttacgttgcatttgacgttaaagatgacaaaggtgtcgtagatgcagatgctaaatttattatctggacaacaacgccatggacaattccatcaaatgttgcgattaccgttcatcctgaattaaaatatggtcaatacaatgtaaatggcgaaaaatatattattgcagaagccttatctgacgctgtagcagaagcactggattgggataaagcatcaatcaaattagaaaaagaatacacaggtaaagaattagagtatgttgtagcacaacatccattcttagacagagaatcgttagtgattaatggtgatcatgttactacagatgctggtacaggttgtgtacatacagcaccaggtcacggggaagatgactatattgttggtcaaaaatatgaattaccagtaattagtccaatcgatgataaaggtgtatttactgaagaaggcggccaatttgaagggatgttctatgataaagctaataaagccgttactgatttattaacagaaaaaggtgcactattaaaattagactttattacacatagctatccacacgactggagaacaaaaaaacctgtaatcttccgtgctacaccacaatggtttgcctcaatcagtaaagtaagacaagatattttagatgcaatcgaaaatacaaacttcaaagtaaattggggtaaaacacgtatttacaatatggttcgtgaccgtggcgaatgggttatttctcgtcaacgtgtgtggggtgtaccgttaccagtattttatgctgaaaatggcgaaattatcatgacgaaagaaacagtgaatcatgttgctgatttatttgcagaacacggttcaaatatttggtttgaaagagaagcgaaagacttactaccagaaggatttacacatccaggcagccctaacggtacatttactaaagaaacagacattatggacgtttggtttgattctggttcatcacaccgtggcgtgttggaaacaagaccggaattaagtttcccagcggatatgtatttagaaggtagtgaccaatatcgtggttggttcaactcttctatcacaacttcagttgctacaagaggagtatcaccttataaattcttactttctcatggttttgttatggacggtgaaggtaagaaaatgagtaaatctttaggtaatgtgattgtacctgaccaagtggttaaacaaaaaggtgctgatattgcgagactttgggtaagtagtacggactatttagctgatgttagaatttctgatgaaattttaaaacaaacatctgatgtttatcgtaaaatcagaaatacattaagatttatgttaggtaacattaacgatttcaatcctgacacagatagcattcctgaatcagagttattagaagtggatcgttacttgctaaatcgtttacgtgaatttactgcaagtacgattaacaactatgaaaactttgactacttaaatatttatcaagaagttcaaaactttatcaatgttgagttaagtaatttctatttggattacggtaaagatattttatatattgaacaacgtgattctcatatccgtcgtagtatgcaaacagtgttatatcaaattttagttgatatgacgaagttgttagcaccaatcttagtgcatacagctgaagaagtttggtctcatacaccacatgttaaagaagaaagtgttcacttagcagacatgcctaaagttgtagaagtagatcaagctttattggataaatggcgtacatttatgaatttacgtgatgatgtgaaccgtgcattagaaactgctcgtaatgaaaaagttattggtaaatcattagaagctaaagttacgattgctagtaacgataaatttaatgcatctgaattcttaacttcatttgatgcattacatcaattatttatcgtgtcacaagttaaagttgtagataagttagatgatcaggcaacagcttatgaacatggtgatattgtcatcgaacatgcagatggtgaaaaatgtgaaagatgttggaactattcagaggatcttggtgctgttgatgaattgacgcatctatgtccacgatgccaacaagttgtaaaatcactggtataattgaaattgtataaagtacttatacagatgatataaattaaagctctcttcataatcatgttgtagtttttgttgacatgatgaagagagtttttttgtgaataaaaaaatgaccaagttactggttatatgtgttaaaaaatgtgtaatttactaaaataaaaattattcaggaatggtacaaattctctgaagcttataaatgcgttatagttgctattctcaattatgttcgcgataattttaagtaaaagtaagcacagatattgaatttgataggagttaattgaatgtatcataacagtaacgcaaactttgtaaatggtatcactttaaatgtgagagataagaatgaattaaagccattttatgaggacgtattaggattaaatattataaatgagacattaacatcgatacaatatgaagtaggtcaaaataatcatgtcattacacttgttgaattacaaaatggacgtgaacctttaatgtccgaagcgggactgtttcatatcgcaattaaactacctcaaattagtgatttagctaatttactaattcatttaagcgaatatgatattccagttaacggaggtatacagcctgcttcgttatcattattttttgaagacccagaaggaaacggttttaaattttatgttgataaagacgaagcgcaatggacgaggcaaaatgatttagtaaaaattgatattagaccattaaatgtaccgagattagtgagtcatgcaacaaaattgttatggttaggtattccagatgacgctattataggtgcattgcatattaagacaattcatttatcagaggtaaaagagtactacctcgattattttggattagagcaatcggcatatatggatgattattcaatatttttagcatcgaatggctattatcaacatttggccatgaatgattgggtatcagcaacgaaacgtgtagaaaattttgatacgtatggattagcaattgttgactttcattatcctgaaacaacacatttaaatttacaaggtccggatggtatctattatcgctttaatcatatcgaagttgaagattagtatatactttgaatggacgaaccatataatgaatcgtttttaatgatctttttatacaagttatgaaggaggctgggacattaagttcttaggcaatgtaaaaagctgatttctattaattatttgatagaaatcagcttttttgatatgtattttataatgtacagctcgttgagctgctattttccttatattaagtgccattaatacaaaacctagctctcgtttaactttatttattcctcgaactgacattcgagtgaaactcaaaatagcctactttcttaaattaacaatatctattctcatagaatttgtccaattaagtgtagacgattcatgtcttatttttttaaagtatttaaaagtaaaattacatgttaatacgtagtattaatggcgagactcctgagggagcagtgccagtcgaagaccgaggctgagacggcaccctaggaagggacccatcatcaaaaattctatttatagaattttacagtaatgtgccagatgggcatagcgaagccattcaatacgaagtattgtataaatagagaacagcagtaagataatttttaattagaaaatatcttactactgtctttttagggatttatgttccagcctgctttcctaatttttaatgtcatcttaaatatgataaatgaataattaagttcatatttaatgtcaaaacatagtagtttatcaagtattgagtgagtaacattagatttaatgtaatatgcttactttttttattagcaggtgtaagctataatataaagagttgtcttatggacgattgattggaggaacgaaaatgcacaaaaaatattttattggcacttccattttaatagcagtatttgtcgttatatttgaccaagttactaaatatattatagctactacaatgaaaattggagattcatttgaagtgataccgcactttttaaacataacatcacatcgaaataatggtgctgcatggggaatattgagtggaaaaatgacatttttctttattattaccattattatattaatagccttagtatatttctttattaaagatgctcaatataatttgtttatgcaagttgctattagtttactttttgcaggtgcacttggaaactttattgatagaattttaacaggagaagttgttgactttattgatacaaatatttttggttatgattttccaatatttaatatagcagattcaagtttaacaattggtgtaatattaattattattgccttattaaaggatacttccaataaaaaggagaaggaggttaagtaatggagacttatgaatttaacattacagataaagaacaaacaggtatgcgtgtagataagttgctgcctgaattaaataatgattggtctcgtaatcagatacaagattggattaaagcaggtttagtcgttgcaaacgataaagttgttaaatctaattataaagtgaaacttaatgatcatatagttgtcactgaaaaagaagtggttgaagctgatattctacctgaaaatttaaatttagatatttattatgaagatgacgatgttgcagttgtatataaaccgaaaggcatggtagttcatccatcaccagggcattataccaatacattagttaatggtttaatgtatcaaattaaaaatttgtcaggtattaatggagaaattcgtccaggtattgttcaccgtatagatatggatacttctggtttattaatggttgctaaaaatgatattgctcatcgtgggcttgtagaacaattaatggataaatctgttaaaagaaaatatatcgctttagttcacgggaatattcctcatgattacggtacaatcgatgcgccaattggtagaaacaaaaatgatcgtcaatctatggctgttgttgatgatggtaaggaagcagtgacacattttaacgtactagaacattttaaagattatacgcttgttgaatgtcaacttgaaacaggacgtacgcatcaaatccgtgtgcacatgaaatatattggcttcccattagttggtgatccaaagtatggaccgaaaaagacattggatattggtggtcaagctctacatgctggacttattggattcgaacatccagtaacaggtgaatatattgaaagacatgctgaattaccacaagactttgaagatttattagatacaattcgaaaaagagatgcataattgtgttgtgctataattacgataacattattatgtaaactataagtatttatcgttttcgtttttttaaaatgaaaacacattataaaatagattaaggttaacatttttactgagatcggttaatttttcaatatagattgacaaagcgcctgattagtattatccttataacagtttaagtacaacataaagagtctttaattgagcgtccagagagacgtcaaagacatgaaaatatagatatatactaaaatgatcataacactttcacatatgcaagaataagtagtaatactacgattcttctatgtaaataggctgattgtatatactaaacctcatgtcgatattaaagacatgaggttttttgtttctaaattttgaaagggtgagaatatgtctgaacgtatcataatggatgatgccgcaatacaacgtacagtgacgagaatcgctcacgaaattttggagtataacaaaggtactgataatttaattcttttaggtatcaaaacaagaggtgaatatttagcgaatcgtatacaagataaaattcatcaaattgagcaacaacgtatacctactggaacaattgatattacatactttagagatgatatagagcacatgtcatcacttacgacaaaagacgcaatagacatcgacacagatattacagataaagtagtcatcattattgatgatgtgctgtatactggtcgaacggttcgtgcttcacttgatgctattttgctaaatgctagacctattaaaattggtttagctgctttggttgatcgaggacatcgtgagttaccaattcgagcagattttgttggtaaaaatatacctacttctaaagaggaaacggtaagtgtctatttagaagaaatggatcaaagaaatgcagttataattaaataataccccttttaattcagtacgagagactgaaaaaggtgggggagttgaatgataaataagttttcatatgcttgtttatctaataataccctcatgttcgacaactataagtcaatttctatggacgaaaatgacttgtagcaacttgtcacactttttgtctctttacatatactgatgtaaagagatttttttattatcggaggaaatgaatattatgcaaaatgatgaaatgtttgaacgaacagtaaaaccagtactagatgtaaatgaaaaaccacaaccagcgcaatgggcatttttaagcttacaacatttatttgcgatgtttggcgcaacagtactagtaccattcttaacaggactaccaatatccgcagcgttactagcttcgggaatcggtacattactttatatcttaataacgaaggcgcaaataccagcatacttgggatctagctttgcatttatcacaccaattatcacgggattaagtacgcatagcttaggagacatgcttgtagcattattcatgagtggtgttatgtacgtcatcatcggaattctaatcaaattaagtgggacagcatggttaatgaaattattaccaccagttgttgttggaccagtcatcatggtaattggtttaagcttagcgcctactgcagtcaatatggcaatgtatgaaaatcctggagatatgaaaggttacaatatcagtttcttaattgttgcaatgataaccttgcttgtaacaatagtcgttcaaggattttttaaaggattcctatctttaattccagtacttgtaggtattatcgtaggttatgtggtagcgatttttatggggattgtgaaatttgatgcaattatgtcagcaaaatggatagatttccctcatatttatctgccatttaaagattatgtaccttcatttcacttaggacttgtacttgtaatgattccgattgtgtttgtaacagtaagtgaacatattgggcaccaaatggtattgaataaaatcgtaggtagaaacttctttgaaaagccaggacttgataaatcaatcattggtgatggtgtttctacaatgtttgccagtattattggtggaccaccaagtacaacatacggtgaaaatatcggtgtattagcgattacaagaatatacagtatttacgtcattggtggtgcagcagttatagcaattgttttagcattcattggtaagttcactgcattaatttcttctatacctacaccagttatgggaggagtatctatattacttttcggtattattgcagcaagtggcttaagaatgttagttgaaagcaaagtagattttgcgaacaatcgaaatttagttatagcttctgtaattttagttgtaggtatcggtaatttagtatttaacttaaaagaaattggtatcaaccttcaaattgaggggatggcattagctgcactttcaggaattattttgaacttaatcttacctaaagagaaaaaacaaaacaattaagatttacaaattaaggagggcgcttttatgaatcatttattatcaatggaacatttatctacagatcaaatatacaaacttatccaaaaggcaagtcaatttaaatctggtgaacgtcaactaccaaactttgaagggaaatatgtcgcaaatttattctttgaaaattctactcgaacaaaatgtagttttgaaatggcagaacttaagctagggttaaaaacgattagctttgaaacatcaacatcatctgtttcaaaaggtgaatctttatatgacacatgtaaaactttagaaagtattggctgtgatttattagtcattagacatccgtttaataactactatgaaaaattagcgaatattaacatcccaattgcgaatgctggtgatggtagtggacaacatccaacacaaagtttacttgatttaatgacgatatatgaagaatatggatattttgaaggcttgaatgtattgatttgtggagacattaaaaattcacgtgtcgcacgtagtaattaccatagtttaaaagcattaggtgcaaacgtaatgtttaatagcccaaatgcttggattgatgattctttagaagcaccttatgtaaatatagatgatgttatagaaacagtagatatagttatgttattaagaattcaacatgaaagacatgggcttgcagaagaaactagatttgcagcagatgattatcatcaaaagcatggcttaaatgaagtgcgctataacaaattacaagaacatgctattgttatgcatccggcacctgtgaatagaggagtagaaatacaaagcgatttagtagaagcttcaaaatcaagaatttttaagcaaatggaaaatggcgtttacttaagaatggcagtcattgatgaattattaaaataggtaaggggacgaaaatgatgaaattaattaaaaacggtaaagtattacaaaatggagaattacaacaagcagatattttaattgatggtaaggtaattaaacaaattgcacctgcaattgaaccaagcaatggtgttgacatcatagatgcgaaaggtcactttgtgtcacctggatttgtcgatgttcatgttcatttacgtgaacctggtggtgaatataaagagacaattgaaactggtactaaagctgctgctagaggcggatttacaactgtatgtccaatgcctaacacaagaccggtaccagattctgtagaacattttgaagctttacaaaaattaatcgatgacaatgctcaagtacgtgtattaccttatgcttcaattacaacacgtcaattaggtaaagaattggttgatttcccagcactagtaaaagaaggtgcctttgcgtttacagatgacggtgtaggagtacaaactgcaagcatgatgtatgaaggcatgattgaagctgcaaaagtaaacaaagccatcgtagcacactgtgaagataattcattaatctatggtggtgcaatgcatgaaggaaaacgcagtaaagagttaggtataccaggtattccaaacatttgtgaatctgttcaaatcgcaagagatgtactattagctgaagcagcaggttgtcattatcatgtatgtcatgtttctactaaagaaagtgttagagtcattcgtgacgctaaacgcgcaggcattcatgttacagctgaagttacaccacaccatttattgttaacagaagatgatattcctggtaataatgccatttataaaatgaatccaccattgagaagtactgaagatagagaggctttgttagaagggttactagacggtacaattgactgtatcgcaacagaccatgcaccacatgcacgtgatgaaaaagcacaaccaatggaaaaagcaccattcggaattgttggtagtgaaacagcattcccattattatatacgtattttgtaaaaaatggtgattggacattacaacaattagtagattacttaacaattaaaccatgtgagacatttaatttagaatacggcacattaaaagaaaatggttatgcagatttaacaatcattgatttagatagtgaacaagaaattaaaggagaagatttcttatcaaaagcagataatacaccatttatcggctataaagtttatggaaatccgatcttaacaatggttgaaggcgaagttaaatttgagggggataaataatatgcaaagcaaacgttatctagtgttagaagacggttctttttacgaaggctaccgtttaggatctgataacttaactgtaggagaaattgtatttaatacagctatgacaggttatcaagaaactatttcagatccatcatatacaggtcagatcattacttttacgtatccattaatcggtaattatggtatcaatagagacgattttgaatcattagtacctacattaaacggtattgtagtgaaagaagcgagtgcgcatccaagtaattttagacaacaaaagacacttcatgacgttttagaattgcatcaaattccagggattgcaggtgttgatacaagaagtattacgcgtaaaattcgacaacacggtgtgttaaaagctggttttactgatcgaaaagaagatattgatcaacttgtcaaacatttacaacaagtagaattacctaaaaacgaagtagaaatcgtttcgactaaaacaccgtatgtttcgacaggtaaggatctaagtgtcgtacttgtagactttggtaagaagcaaaatattgttcgagaattaaacgtcagaggttgtaacgtcacagttgtaccatatacaactactgccgaagaaattttagcaatggctccagatggcgttatgctatcaaacggaccaggtaatcctgaagttgtagaatgtgcgattccaatgattcaaggaattttagggaaaattccgttctttggtatctgtctaggacatcaactttttgcattatctcaaggagcaagctcatttaaaatgaagtttggtcatcgtggtgcgaaccatccagttaaaaatttagagactggaaaagttgatattacgagtcaaaaccatggatatgcaatagatatagattcgttaaaaagtactgatttagaagttactcatcttgcattaaatgatggtactgtagaaggtttaaaacataaaacattaccagcattttctgttcaataccatcctgaagcaaatccaggaccgtcagattcaaactatctatttgatgattttgtagcaatgatgactaattttaaggaaaaggagcgtcatatcaatgcctaaacgtaatgatatcaaaacaattttagtaatagggtctgggccaattatcataggtcaagcagctgaatttgattatgctggaacacaagcatgtctagctttaaaagaagagggatatcgagttattcttgtaaattcaaatccagcgacaatcatgactgataaggaaattgcggataaagtatatatcgaaccgttaactcatgattttatagcgcgaattatacgtaaagagcaacctgacgctttacttccaactttaggtggtcaaacaggtttaaacatggcgattcaactacacgaaagtggtgtgcttcaagataataacgtccaattattaggaactgagctaacatcaattcaacaagcagaagaccgtgaaatgtttagaacattaatgaatgatttaaacgttcctgtaccagagagtgacattgtaaatacagtagagcaagcctttaaattcaaagagcaagtgggatacccgctaattgttagaccggcatttacgatgggtggtaccggaggcggtatttgtcataatgatgaagaattacatgaaatcgtctcaaatggtcttcattatagtccagcaacgcaatgtttattagaaaaatctatcgcaggttttaaagaaatcgaatacgaagtaatgcgtgataaaaacgataatgccatcgttgtatgtaacatggaaaatattgatccagttggtattcatactggcgattcaattgttgtggctcctagtcaaacattatcagatgttgagtatcaaatgttacgtgatgtttcattaaaagttattcgagctttaggtatcgaaggtggttgtaatgttcaattagcattagatccccattcattcgattattatattatagaagtaaatccgcgtgtatcacgttcatcagcgttagcttcaaaagcaacaggatatcctattgcaaaattagctgctaaaatcgcggttggtctaacattagatgaaatgttaaatccaattacaggaacatcttatgcagcgtttgaaccaactttagactatgtgatttcaaaaataccaagatttccttttgataaatttgaaaaaggagaacgagagcttggcacacaaatgaaagcaacaggtgaagttatggccattggtcgaacttacgaagaatcattgttaaaagcaattcgatcacttgagtatggtgtgcatcacttaggattaccaaatggtgaaagcttcgatcttgattatattaaagaacgtatttcacaccaagatgatgaacgattatttttcatcggcgaagcaattagaagagggacaacattagaagaaattcataatatgactcagattgattacttcttcttacacaagttccaaaacattattgatattgagcatcaattaaaagagcatcaaggtgatttagaatatcttaaatatgcaaaagattatggatttagtgataaaacaatagcgcatcgctttaatatgacggaagaagaagtatatcaattgcgtatggaaaatgatattaaacctgtttacaagatggttgatacttgcgcagctgaatttgaatcttcaacaccatattattatggtacatacgaaactgaaaatgaatccatagttactgacaaagaaaaaatcttagtattaggctctggaccaattcgaatcggccaaggtgtagaatttgactatgcgacagttcacgccgtttgggcaattcaaaaagcagggtacgaagcgataattgtgaataacaatccagaaacagtttcaacagacttctcaatttctgacaaattatactttgaacctttaactgaagaagatgtgatgaatatcattaatttagaaaaacctaaaggtgtcgttgtacaatttggaggacaaacagcgattaatttagcagacaaattggctaaacatggtgttaaaatacttggtacttcactagaaaatctaaatcgtgctgaagatagaaaagaatttgaagcactattaagaaaaattaacgtgccacagccacaagggaaaacagctacatcacctgaggaagcattagcgaatgctgcagaaatcggatatccggttgtagtaagaccttcttatgtattaggtggtcgcgcaatggaaattgtagacaatgacaaagagttagaaaactatatgacccaggctgtaaaagcgagtccggaacatccggtactagtcgatagatatttaactggtaaagaaattgaagttgatgcgatttgtgatggagaaacggtcattattccaggaatcatggaacatattgaacgtgctggtgtacatagtggtgactcaatcgctgtatatccgccacaaactttgacagaagacgagttagcaacacttgaggactatactataaaattagctaaaggtttaaacatcattggcttaatcaacattcaattcgttatagctcacgatggtgtatatgttttagaagtaaacccacgttctagtagaacggtaccattcttaagtaaaattactgatattccaatggcacaattagctatgcgagcaatcattggggaaaaactaacagatatgggttatcaagaaggggttcaaccatatgctgagggtgtctttgtgaaagcaccggtatttagttttaataaattgaaaaatgttgatattactttaggacctgaaatgaagtcaacaggtgaagtgatggggaaagatactacattagaaaaggcgttattcaaaggggtaacaggtagtggcgttgaagttaaagatcacggtacagtattaatgaccgtcagtgacaaagataaagaggaagttgttaaattggcacaacgcttaaatgaagttggctataaaattttagcaacgtctggaacagctaataaattagctgagtatgacatacctgcagaagtagtaggcaaaattggtggcgaaaatgatttattaacacgtattcaaaatggtgatgttcaaatcgttataaatacaatgactaaaggtaaagaagtagaaagggatggcttccaaattagacgtactacagttgaaaatggtattccatgtttgacatctttagatacagctaatgccttaacgaatgtaattgaaagtatgacatttacaatgcgtcaaatgtaaatcaatcaaactgtatcggtggggctgtaattaaccatttacttaaagaagtttatattacagcctcattattttaatgaatttcttaatataaagggagacatatatgatgaaagatttaccaattattgcattagattttgaatcaaaagaaaaagtaaatcaatttttagatttatttgatgaatcattattcgtaaaagtaggtatggaacttttttatcaagaaggtcctcaattaattaatgagataaaagaaagaggccatgatgtatttttagatttaaaattgcatgatattcctaatacagtaggtaaggcgatggaaggactagctaaattgaatgttgatctggtaaatgttcatgctgctggtggcgtaaaaatgatgtctgaggccattaaaggattaagaaaacataatcaacatacaaaaattattgcagtaacacagcttacgtcaacaacagaagacatgttacgacacgaacaaaatatacaaacatcgattgaagaggccgttttaaattatgccaagttagcaaatgcagctggtttagatggcgttgtttgttcacctcttgaaagtcgtatgttgactgaaaagttaggtacatcatttttaaaagtaacaccaggtattagacctaaaggtgcatctcaagatgaccaacaccgtattacgacaccggaagaagcaagacagcttggttcgacgcatattgtagtcggtagaccgattacacaaagtgacaatccagtcgaaagttatcataaaattaaagaaagttggttagtataatggctaaagaaattgcaaaatcattattagatattgaagctgtaacattatcaccaaatgatttatatacatggagttcaggtattaaatcaccgatttactgtgataaccgtgttacgttaggttatcctttagttcgaggcgcaatccgcgatggtttaattaacttaattaaagaacactttcctgaagtagaagttatttctggtactgcaacagctggtattccacatgcagcttttattgctgaaaaattaaaattaccaatgaattatgttcgttcatcaaataagagtcatggtaagcaaaatcaaatcgaaggtgctaaaagtgaaggtaaaaaagtagttgtgatagaagatttaatttcgacagggggatcttcagtcacagcagttgaagccttaaaacaagcaggtgcagaagtattaggtgttgtagctatctttacttacggtttgaaaaaagcagatgatacatttagcaatattcaactacctttttacactttaagtgattacaatgaattaattgaagtagctgaaaatgaaggtaaaatttctagtgaagatatccaaacattagttgaatggagagacaacttagcataatatagacactagaaggaggaattcaacaaatgaatgacaaaacatctaatgatttatatgggaagataaaacattgtaacgaatttatcaatcattcaaatgattccaatctatctagtagtcacgatgtcgacgaaagttcaacgaagcaaaaacatataaaaaataaaacaactatagatcataatgatgatttatttaaacatgtaaaggatatattacgtaaacaaggacaaatttaaaaacaaaaaagctatagtgtttaatatcaggggctgcttaaccgcatccgaatattacaaacactatagcttttattatataaaaaatttattagcggataattaactttattaaaatccaaccaattaagaatacgagtaataggactaatactggaatcacataatgtaacataacgtccctcctttaacttaattttaattgtaatcaaatttgacaataagtcaaaacattaatacctatgataagtatcatttattaacatatgtatcatatttttaatcttgcgtaatttttatcgttaactatgtgatttaatcaacaggccaataagacgtttgtcattcgtgcacataacggtatgacgcgcttttgtcattttaattatgttaagataatagtagttatagaagttcgacctataggaggcatagcatggatattccaaaaatcacgacatttttaatgtttaataaccaagctgaagaagctgttaaactatacacaagcttatttgaagatagtgagattataacaatggctaagtatggtgaaaatggacctggtgatcccgggactgtacaacactcaatatttacattaaatggacaagtattcatggcgattgatgctaatagtggcacagaattaccaatgaatcctgcgatttcattatttgttacagtaaaagatactattgaaatggaacggctatttaatggattaaaagatgaaggtgccattttaatgccaaaaacgaatatgccaccatacagagagtttgcttgggttcaagataagtttggagtaagttttcaattagctttacctgagtaaaaggatttgcacagcgttgaatgataaagaaacactttttcttatgcatgcgttttacctatgtatttctattttaagtacacattagcattttagtttcactcatttttaaaatcacaaagataatttgtaacttaaatgatgatacgttatttaaaaacacgatacttcgtttcaatgaacgcattaaattaaaaataaacacctcgcaaaagaaagtagtcctttcttatggtgaggtgtttatttgtcgacaacttgattatgattgtttcattttttgaatatgttcataatcaggtgtagcatacaaagttttttgattgtcatatgttacaaacccaggctttgcacctgatggtttgtgcacatttttaattaatgtgtaatcaacaggtatttgtccagaattaccagcttttgaaaagtatcctgctaacatagccgcttccttgattgtcgtatcacttggtgcatcattaaatataacgacatgtgaaccaggaatatcttttgtgtgtaaccatgtgtgagtttttttagcttttttatttgttaaataatcattttgcttgttattcttgccaacatatatatcgtcgccatcagttgatacataatgttgtaattgaatctgcgctttctttttcttagtttgatttttacgctgtttcataaagccttgttctgctaattcatctctaatttcatcaatgtcatggacagaaatatgatgtaattgttgttcgattgttgaaaaataatctatattgtctttcgtcaattgaatttgatgttgtaattcacgttctctcgttttcatacgattatattgtttataataatattgagcatttgctgatggggattttgtaggatttaaaggaatgacaacttcttcattcgtataataattcaatgccgtcacttctttatcgccttgcttaattcgatatatattagcagtgatcaattcaccatataactgttcagtatctttatttttagactgctcatattcttcaatcaacttcgctaatttattttgatatttgtgcaactgctgttgaacaaatcgaactaaatcattcgcacgttgtttaacgcgttcacgttcgccacgcgcgtcataaaaacgatcaagtaaatcatttaatgaatcgtacgtaactgtatcatcattaaattgatttaactttataaaatagaaatcctctttacctgtttcatgatttttatgaaaaataggagtaggtggtaacttggtttctgccattacttcgtcaaatgcttctggtaatgttgatgaagtcataaattgacgacgactaacgatttcattcgtaattaaagggctaaatccttcaaactgattcaataattgtttagcaatattacctgcgttaaaatcgatatatttcaacacctctgcacctgtaatatcatacggatttattttgtgctgagtaggtggtgcttcataattaaatcctggcattactgtacgatagtgattcgtatttggtgttaagtgtttaaatccttcaattattttgcgattttcatctactaaaattaagttactatgtttacccataatctcaaggatgacagtgcggtaaatagtatcgccaatttcatctttactctttatatcgatttcaatgcgacgatcattaccaatttgcttaatcgattcgataataccaccttctaagtgttttctaaaaacacgcgcaaacatgggtggattaaatggattatcatattttttagtagtcaattgtaatcttgaaaagtttggatggattgacaataacaattgatggttttgtctattttgacgtacaaccattagtatcgtgtcattatcaggttgattgattttgtgaacgcgtcctgttgttaaaaattgtagagactcaaccattttctttgtaaataagccatcataagccataatttatcttccaccttcttcatatcattcgtttcattttaacatgattgtaacttttcggtatagttattgaaccatacattatgccatacattttacattatctaaaagttcgcaattcaatttatttaattaaaattaatcgtgcaatataacgatattgttagacctaatagaaattatggcatgcaatttcaaatatgctatacaatataaagaacaatgtgatatcatatttaaataatagaagattagcttagagaggtcgtaaggcatggataatgaaaaaggattgttaatcgttttatcaggaccatctggagtaggtaaaggtactgttagaaaacgaatatttgaagatccaagtacatcgtataagtattctatttcaatgacaacacgtcaaatgcgtgaaggtgaagttgatggcgtagattacttttttaaaactagggatgcgtttgaagctttaattaaagatgaccaatttatagaatatgctgaatatgtaggcaactattatggtacaccagttcaatatgttaaagatacaatggacgaaggtcatgatgtatttttagaaattgaagtagaaggtgcaaagcaagttagaaagaaatttccagatgcgttatttattttcttagcacctccaagtttagatcacttgagagagcgattagtaggtagaggaacagaatccaatgagaaaatacaaagtcgtattaacgaagcgcgtaaagaagttgaaatgatgaatttatacgattacgttgtagttaatgatgaagtagaacttgcgaagaatagaattcaatgtattgtagaagctgagcacttaaaaagagagcgcgtagaagctaagtatagaaaaatgattttggaggctaaaaaataatgttaaatccaccattaaaccaattaacgtcacaaattaaatcaaagtatttaattgcaacaactgcagcgaaaagagcgcgtgaaattgatgaacaacctgaaactgaattattaagtgaatatcattcatttaaaccagttggtagagcgttagaagaaattgctgacggtaaaattcgccctgttatttcaagtgattattatggtaaagaatagtttcggccattaaaaatatgtgaagctagacgtacatcaaatacgtcaagggatatccaaatcaaacgcacctatgtaggtgtgtttttttagtttatccaatgattgatgttataataatactaaatttgtatctataaaaaagtaatgagcatttgtgcgcatatgatgatgtaaagcgtaaatgtcatagtgatatttaagggagattgaatatgaagaaaatattattagccgttacaggtggcattgcggcatataaagcgattgatttgacaagtaagttaacacaatctgggtatgaagttcgcgttatgttaacgaatcacgcacaaaaatttgtgacaccattagcatttcaagcaataagtcgaaatgctgtttatacagatacttttatagaagaaaatccttcagaaatacagcatattgcattaggtgattgggcagatgcaatcattgttgcacctgcaacggcaaatacaattgcaaaattgagtgtaggtattgctgatgatttggtgacatcaacgttgctagcaacagagacaccgaaatttattgcgcctgctatgaatgtgcatatgtatgaaaataaacgtacgcagcaaaatattaatattttaaaagaagatgggtatcattttatcgaaccaggaagcggatttctagcatgtggttatgttgctaaaggacgtatggaagaaccgcttcaaatcgtttctgttattgatgctcattttcaaaatagtaatcgtttagctaatagttcatttcaagataaacgcgcattggttacagcaggaccaactattgaagttatcgatccagtcagatttgtatccaatcgttcttctggaaaaatgggttatgcaatagctgaagcattgcgaaatcgaggagctatcgtgacgttagttgctggtcctacaacactagaggatccaaaagatattgaagttattcatgttcaaagtgctgaagaaatgtttgaacaagtgacaagccgatttgacgaacaagatattgttgtaaaagcagcagccgtatctgactatacaccggttgatgtattagaacataagatgaaaaagcaggatggtgatttgtcagtatcttttaaacgtactaaagacattcttaaatatttaggtgaacataaaacatcacagtatttaataggctttgcagcagagactgaagatattgaaaattatgcacaacaaaaattacgcaagaaaaatgcagatgtgattatttcaaataatgttggggatatgtctatcggatttagttctgatgataatgaattgacaatgcattttaaaaataatgaaaaagtaaatatcaagaaaggaaaaaaagtagtattagctgcacaaattttagatgaactagaaactaggtggcaataatgatagcgaaagtcatagtcgatgtcgcgtcgaagagcgttgactataaatttgattatataattcctgaacaactcgaatctgtcatccaacctggtgtgcgtgtgattgtaccttttggaccaagaacgattcaaggttatgtaatggaagtaacagcagaacctgatgcacaacttgacgtttcgaagttaaaaaaaatcatagaagtgaaagatatacaacctgaattaacatcagaattaatagctttaagtgagtggatgggttcaactcatgtcattaaacgtatttctatgctagaagtgatgcttccgagtgctattaaagcgaagtataaaaaagcatttaagatgaaagatgacatagaggtaccttcagctttattacaaaaatttgataagcatggttactattattataaagatgcgcaaaaaaataatgatattcaattgcttatgaagttgttaaaagatgatatcgttgaagaaagaacgattctaacacaaaatataactaaaaaaaccaagcgtgctgttcgtgtcattgaagggtatcatcctgatgaagtattagctaagttggagaaagttattaaacaatacgatttgtatgcttacttgtctgaagaacaacataaaacaatatttttaactgatattgaggatatgggcttttcaaaatccagtttagatggacttatcaaaaaaggttatgttgaaaaatatgacgcagttgttgaaagagacccatttaaagatcgtgttttcgaacaagaatcaaaacagcaattaacagaagaccaatataaagcatatgaagcgattaaagctaaaattgtaagccaagagcaagaaacatttttacttcatggtgtgacgggatcaggtaaaacagaagtatatttacaaacgatagaagatgttttaagtcaaggaaaacaggcgatgatgttagttcctgaaatcgctctaacaccgcaaatggttttacgcttcaaacgtcgatttggtgatgacgttgctgtattacattctggcttatctaatggggaacgttatgatgagtggcaaaaaataagggatggtcgtgcgagagtaagtgttggtgcaaggtcaagtgtgttcgcacctttcaaaaatttagggttaatcatcattgatgaagaacatgaatctacatataagcaagaagattatccgagatatcacgctagagaaattgcccaatggcgaagtgaatatcatcactgcccagtcattttaggaagtgcaacaccatgtcttgaaagttatgcacgagctgaaaaaggcgtttatcatttgctatcattaccaaacagagtgaaccaacaagctttacctgaaattgatatagtagacatgcgtgaagaattgagtgaaggtaatcggtcaatgttttcaaaagatttacgtgaagccatacaattaagattagatcgacaagaacaagttgttttatttttaaatcgacgtggttatgcatcatttatgttatgtcgggattgtggttatgtaccgcaatgcccaaactgtgatatttcattaacgtatcataaaacgacagacttattaaaatgtcactattgtggttaccaagagacgccaccgaatcaatgtccaaattgtgagagtgaacacattcgacaagtaggtactggtactcagaaagttgaagaactgttgcaacaagaatttgaagatgcgcgcataattaggatggatgtagatacaacctctaagaaaggtgcacatgaaaagttattaactgaattcgaaaaaggtaacggtgacattttactaggtacccagatgattgcgaaaggattagattatccaaatatcactttagttggtgtgctgaatgcagatacaatgttaaatttacctgattttcgggcgagcgaacgcacttatcaactattaacgcaagtggctggtagagctggtcgtcatgaaaaggcaggtcaagtcatcattcaaacgtataatccagaccattattcaatattggatgttcaaaaaaatgattatttaacattttatcgtcaggaaatggaatatcgtaaattaggaaagtatccaccgtattattatttgattaatttcacaatctcacataaagaaatgaagaaggttatggaagcatcgcaacatgttcataaaattttattacagcatttaacagaaaaagcgcttgtactaggcccatctccggcagcacttgcgagaatcaacaatgaatttagattccaaattttagtgaaatataaaagtgaacctggattattaaaagccattcaatttttagatgactattaccatgaaaaatttataaaagaaaaattagcattgaagattgatattgatccacagatgatgatgtaattttttgactaaaacactttaatatcaatgtttcctaagagtatgaaaggtcttgtttttactttaagtacagaaaaagggcagaatatacaactgttaactatttaaattagcagtttatattctgtctttttatatggctttataacttacgtgattttggtttgataaggaatttattagtattttcatttacgaattctgattttaatgcaagcgccatacttactgatgaataaaagtactaatgattaaacaaactatttttaaatggcaaattgaaatagtgcaaattttacacttataaattaatggctataaactattttatatctatctatgttttaactacttaaattattagacaaaacaattttcttaaattatcaattaaagtatttaaaaatattgatggttaatgtaaaatatcaatataaataagttttttaaatttatgtatgtttatttgattcaaacaaaataacttaagaggagaaagtttatgaaaaagacactgggatgtttacttttaattatgcttttagtcgtagcaggttgttcttttggtgggaatcataaattatcatcaaagaaatcagaagaatcaaaacaagaaactgtaaaaaaagaatcggaagaagagaaagatccagatttagagaaatatgaagaaatagagaagaaaatgaaaggaattaaagatgcgccatctcttgataagttggatccattaatgacagaaaagtcgtttacgaatagtaaagggattcaaggatggaaagattacaaagaattaatgggtaaagtggaacttgcagattatagatttactaaagattcaaaaggatcttcaataaaagatgttgatgcattctttaaaggtaagaaaggtataaaaaggaaagtgattgaaacacacgatgatgtaaaacaagttgattattggtatgtagatccagatggaaagaaaattggcaattcaaacacacctgttttttacgcagaaattatgacaaaatataaagatggaaagttagtttatgcatcagtcgaaccaggatcttacgtaatacataaagatgatgcaattaaatatgacgattattctaagttaaaaaaattaagtcagctaactaaacttgatcatccaaaaccagttccatatagcgtagctcaaatcaaatctttcggagtacctttaacaagcgtttcatttatgacacatggatcaaaggatactaaagatgaagtgttgccggcattggcctatttcactttttcaccaaaaaattatgaagacaagtctaatccagatccaaaagttttaaatttagtacatatggatttcttaaatgcatctagtgattttggtaacgcacattttgttgttttaagtaaatatattaaagagtatgaatcaaactatgaaacagcgtcagatgattctttaaaatagtatttactgtgtgaaaaataaatagtgtactacattaaataatcgcaataataatcccgataaacaatcagcattactgcttatcatatagagttcgtaataactataactctatgattcgcaattaataaatgattgtcatcgggatttatttttatcaatttataatgtaacattaccatgttcgtcagctggtttgaaaacagtaattatcgcactaataattgctaatatatgagggatgactgtccaaaagaatattaagtgtaggaaaccttgcatgtttttgccggcataaaatttatgaataccaaaactacctaagaacaatgctaataaaatataaataactttgtttacttgcatttctttccctccagttgaattgcttataatgacattagtttctctttttattatacccacttttagttcaaacattctagtttaagcattcccaatcatctaaatttcagttattcattccttacaataaatttaggattacacttcagttgcattgtattattttacgtgtgaaatatacgtaatgaatcacatgacaatcttcaaattgaaaaatatacattctatgatgtaaggtcgcatttttaatatatttacgttataatagtttgatgaattttattgaggagtaagagttatggcgattaaaaagttagtaccagcatcgcatcctattttaacgaaaaaagcgcaagcagttgtaaaatttgatgattcgttaaaaagattattacaagatttagaagatacaatgtatgcacaagaagctgctggcttatgtgcacctcaaattaatcagtcattgcaagtggcaatcattgatatggaaatggaaggattattacaacttgttaatccgaaaattattagtcaatcaaatgaaacgataacagacttagaaggttcaattacattgccagatgtttacggcgaagtgacaagaagtaaaatgatcgttgtcgaaagttatgacgtcaatggaaacaaagttgaactaactgcacatgaagatgtagcgagaatgattttgcatattatagatcaaatgaacggtatcccttttacagaacgtgcggaccgtattttaacagataaagaagtggaggcatattttataaatgactaaaataatatttatgggtacaccagacttttcaacaactgttttagaaatgcttattgcagaacatgatgtcattgcagtcgtaacgcaaccagatcgacctgttggacgtaaacgtgttatgacaccaccaccagttaaaaaagttgcaatgaaatatgatttacctgtatatcagcctgaaaaattaagtggatcagaagaattagaacaattgcttcaattagatgtagatttaattgtaactgctgcttttggacaattattacctgaatcattgttggcattaccaaaacttggggcaattaatgtacatgcatcattgttaccgaagtatagaggtggtgcaccaattcatcaggcaattatcgatggtgaacaagaaaccggcataacaattatgtatatggttaaaaaattagatgcgggtaatattatttcgcaacaagcaattaaaatagaagaaaatgataatgtcggtacgatgcatgataaattaagtgtattaggggcagatttattaaaagaaactttaccatctattatagagggcacaaatgaaagtgtacctcaagatgatacgcaagcaacatttgcttccaatattcgacgccaagatgagcgaattagctggaataaaccaggaagacaagtgtttaatcaaattcgtggattatcaccatggccagttgcttatacaactatggatgacactaacttgaaaatatacgatgctgaactcgttgagactaataagataaacgagcctggaaccattatagaaacgactaaaaaagccattattgttgctacaaatgacaatgaagctgttgcaattaaagatatgcaattagctgggaaaaagagaatgttagctgccaattatttaagtggtgcgcaaaacacactagtagggaagaaacttatatgatagaaaacgtgagaagtcttgcttttgacacgattcaagatatattaaatgaaggtgcgtatagtaacttgcgtatcaatgaagtgttgtcagaaaatgaattaaatgcaatggataaggctttatttacagaaattgtctacggaaccgttaaaagaaaatatacgttagatttttatttaaagccttttgtgaaaacaaaaattaaggcatgggttaggcaattattatggatgagtatttatcaatatgtttatttagataaagttccaaatcacgccatcattaatgaagcagttgaaatagcaaaagaacgcggtggctatcataatggtaatgtcgtaaatggtattttacgtacaatgatgcgtagtgacttacctgattttaatgaaattgcagatcctaaaaaaagaatggcaatcgagtatagtatgccgaagtggattatagatcattgggcaacacattatggtctcgaaaaaactgaaacaattttacagtcatttttagaaacgacatcaacaactgtgcgtgccaacctgacgcgagcatcattagatgatattattgaaaagttgcaagacgaaggttatgacgttgaaaaagatcatgacttaccttattgtctccatataggaggacaaccaattattcattctcgttcatttaaagatggattcgtttcaattcaagataaaagctcaatgtttgttgcacacattatgaatgtagaccgacatgatcacgtattagatgcatgtagtgcacctggcggtaaagcttgtcacattgctgaagttttaatgccagaagggcaagttgacgcttcagatatacatgatcacaaaatagacttaattaattttaatataaaaaaattacgattaacaaatattaaagcctttcaacatgatgcgacaaaaccttatgataaaacatacgataagatacttgttgatgcaccatgtagcggattaggtgtaatgagacataagccggagattaagtatactcaaagcaaacaacatattgagtcactagttgatttacagcttgaaatattggaaaatgtaaaaaacaatgtaaaaataggtggtgaaatcatctattccacatgtacaatagagcaactagaaaatgaaaacgtgatttatacgtttttgaaaaataataaaaacttcgaatttgaaccgtttcaacatccgataactggagagttggtcaaaacgttacaaatcatgccgcaagactttaattcagatggattctttatcactaagataaaaagaaaggacaattaggaatgataactgctgaaaagaaaaagaagaataaatttcttccaaattttgacaagcaatcaatatattcattgcgatttgacgaaatgcaaaactggctcgttgagcaagggcaacaaaaatttcgagcgaaacagatttttgaatggttatatcaaaaaagagtagattcgattgatgaaatgactaacttatcgaaagacttacgacagcttttaaaagataactttactgttacaactttaacaactgtagtaaaacaagaaagtaaagacggtacaattaaattcttatttgaattacaagatggctatacaattgaaactgttttaatgagacatgattatggaaattcagtatgtgtaacgacacaagtaggttgtcgtatcggatgtacgttttgtgcttctacacttggcggcttaaaaagaaaccttgaagctggcgaaattgtttcacaagttttaacagttcaaaaagcccttgatgctacagaagagcgcgtatctcaaattgtcataatgggtatcggtgaaccatttgaaaattatgatgaaatgatggactttttaagaatcgtcaatgatgataacagtttaaatattggtgcacgtcacattacagtatcaacatcaggtatcattcctagaatatatgactttgcggatgaagatattcaaattaattttgctgtaagcttacacgccgcaaaagatgaagtgcgatcacgcttgatgccaattaaccgtgcatataatgttgagaagttaatcgaagcaattcaatattatcaagaaaaaacaaatcgtcgtgttacttttgaatatggtctgtttggtggtgtgaatgaccaactagaacatgcaagagaattagcacatttaataaaaggcttaaactgccatgttaacttaattcctgtcaaccatgttccagaaagaaattatgtgaaaacggctaaaaatgatatctttaaatttgaaaaagaattaaagagactaggaattaatgccacaatacgtcgtgaacaaggttcggatattgacgcagcttgtggtcaattaagagcaaaggaacgacaagtagaaacgaggtaaagacaaatgctagaggcacaattttttactgatactggacaacatagagataagaatgaagatgcgggtggtattttttataatcaaactaatcaacaacttttagttctgtgtgatggtatgggtggccataaagcaggagaagttgcaagtaaatttgttacagatgagttgaaatcccgttttgaagcggaaaatcttatagaacaacatcaagctgaaaattggttgcgtaataatataaaagatataaattttcagttatatcactatgcacaagaaaatgcagaatataaaggtatgggtacaacatgtgtttgtgcaattgtttttgaaaaatcagttgtgatagcaaatgtcggtgattctagagcctatgttattaatagtcgacaaattgaacaaattactagtgatcactcatttgttaatcatcttgttttaacgggtcaaattacgccggaagaagcatttacacatccacaacgtaatattattacgaaggtgatgggcacagataaacgtgtgagtccagatttgtttattaagcgattaaatttttatgattatttattattaaattcagatggattaactgattatgttaaagacaatgaaattaagcgtttgttagtaaaagaaggtacaatagaagatcatggtgatcaattaatgcaattggcattagataaccattcgaaagataacgttactttcatactcgcggctattgaaggtgataaagtatgataggtaaaataataaatgaacgatataaaattgtagataagcttggcggcggtggcatgagtaccgtttatcttgctgaagatacgatacttaacattaaagttgcaattaaggcgatttttataccacctagagaaaaagaagaaacattaaaacgttttgaacgagaagtacataactcatcacagctatcacaccaaaatatagtaagtatgatcgatgttgatgaagaagatgactgttactacttagtaatggaatatattgaaggtccgactttgtctgagtatattgaaagtcatgggccattaagtgttgacacggcgattaattttacgaatcaaatattggatggtattaaacatgcgcatgatatgcgtattgtacatagagatattaagccacaaaatatattaattgacagcaataaaacgttgaaaatatttgattttggaattgctaaagctttaagtgagacgtctttaactcagactaatcatgtgttaggtactgtgcagtacttttcgccagaacaagcaaaaggtgaggcaacggatgaatgtacagatatttattctataggtattgtgttatatgaaatgcttgttggtgaacccccctttaatggagaaactgcagttagcattgcgattaaacatattcaggattcagtgccaaatgtgacaacagatgtacgtaaggatattccgcaatctttaagtaatgtcattttacgtgctacagaaaaagacaaagcgaatcgttacaaaacaattcaagaaatgaaagatgacttgagtagtgttttacatgaaaatcgagcgaatgaagatgtctatgaactcgataaaatgaaaacgatagcagtgcctttgaaaaaagaagatctagcaaagcatattagtgaacataagtcgaatcaacctaaacgtgaaacgacgcaagtacctattgtaaatgggcctgctcatcatcagcaattccaaaaaccagaaggtacggtgtacgaaccaacacccaaaaagaaatcaacacgaaagattgtgctcttatcactaatcttttcgttgttaatgattgcacttgtttcttttgtggcaatggcaatgtttggtaataaatacgaagagacacctgatgtaatcgggaaaactgtaaaagaagcagagcaaatattcaataaaaacaacctgaaattaggtaaaatttctagaagttatagtgataaatatcctgaaaatgaaattattaagacaactcctaatacaggtgaacgtgttgaacgtggtgacagcgttgatgttgttatatcaaaaggccctgaaaaggttaaaatgccaaatgtcattggtttacctaaggaagaagccgtgcagaaattaaaatcgttaggtcttaaagatgttacgattgaaaaagtatataataatcaagcaccaaaaggatacattgcaaatcaaagtgtaaccgcaaatactgagatcgctattcatgattctaatattaaactatatgaatctttaggcattaagcaagtttatgtagaagactttgaacataaatcctttagcaaagctaaaaaagccttagaagaaaaaggatttaaagttgaaagtaaggaagaatatagtgacgatattgatgagggtgatgtgatttctcaatctcctaaaggaaaatcagtagatgaggggtcaacgatttcatttgttgtttctaaaggtaaaaaaagtgactcatcagatgtcaaaacgacaactgaatcggtagatgtaccatacactggtaaaaatgataagtcacaaaaagttaaagtttatattaaagataaagataatgacggttcaactgaaaaaggaagtttcgacattactagtgatcaacgtatagacattcctttaagaattgaaaaaggaaaaacagcaagttatattgttaaagttgacggtaaaactgtagctgaaaaagaagtcagctatgatgatgtataaatataattgaagtaaatgtaccgaggtttctatttggaagtctcggtatttttatgttgagattgcggtagttttaaaatgcttcatgtcatcatatacaggtgagcattgtctatcaattctgtatcactctcacaatatttatatcatttgaaatgatcatttatatattaattttccagtctttgatataataaatgcagtaaaattaatcgagaggtgccattttgaagacaggtcgaatagtgaaatcaattagtggggtatatcaagtagacgttaatggcgaacgtttcaatacaaaaccacgaggattatttagaaagaaaaaattttcaccggtagttggtgatttagtggaatttgaagtacaaaacattaacgaaggctatattcatcaagtgtttgagcggaaaaatgagttgaaaagaccacctgtaagtaatatagatacactagtaattgtaatgagtgctgtcgaaccaaatttttcaacgcaattattagatcgatttttagttattgcacattcgtatcagttaaatgcgagagttttggtgactaaaaaagataaaacaccaattgaaaagcagttcgaaattaatgagttgttgaaaatatatgaaaatattggctatgagactgaatttattggaaatgatgatgatcgaaaaaaaattgtagaagcttggccagctggacttatagtacttagtggtcaatcaggtgtcggtaagtccactttcttaaatcattatcgtccagaacttaatcttgagacaaatgatatatcaaaatcattaaatcgaggaaagcatactacaagacatgtcgaactattcgaacgtcaaaacggttatattgcagacacacctggattcagtgctttagattttgatcatatagataaagatgaaataaaagattattttcttgaattaaatcgatatggtgaaacatgtaagtttagaaattgtaatcatatcaaagaacctaattgtaatgttaagcatcaattagagatagggaatattgcgcaatttagatacgaccattatttacaactatttaatgaaatttcaaatagaaaggttagatattaaatgacaaaactatatccatcattattatctgttgattttttggatttacaacatgaattaaaacgacttgaagaagcaggtgtcgacggagttcattttgatgttatggatggtcaatttgtgcctaatatatctattggtttaccaatattagatgcagtaagaaaaggcacaacattacctatagacgtacatttgatgattgaaaatccagaaaagtatattgcatcatttgcagaacatggtgccgatatgatttcaattcatgtcgaatcaacgcctcatattcatcgtgctattcaaatgattaaacatttagataaaaaagctggtgtagtaattaatcctggtacaccaatatcacaaattgaacctattttagacattgttgattatgtactagtgatgacagttaacccagggtttggtggtcaatcatttattgatcaatgcgtagaaaaaatagcgggtcttaatgctattaaaatggaacgtcaattaaactttgatattgaagttgatggaggcgtaaataccgatacagcgaaagtttgtgttgaaaatggtgctacaatgctagtaacaggttcatttttctttaaacaagaggattataaaaaagtcacacaagcattgaaaggttgagtgtatatgcatataaatttattatgttctgatcgacacttgccgcaagatatttgggccaaaagtaatgaaggtaaatggggcggcgttgatagaggtgctttgattttattgaagcatcaaattatcccttttttctcagtgggagactttgattcagtcagtaaagaagaacgccaacttctaacagaacagttacaaatcaaaccagttcaagctgaaaaaggtgatacggatttagctttagcggttgataaagctgttgcacttggatttgatagtattacaatttatggtgcaacaggcggacgattagatcacttttttggggcaattcagttattattgaaaaaagcatattataaatatgatgttcatatagaagttatcgatcaacaaaataaaattgaattattgcctaaaggtcaacatacagttgaaaaagataagagttatccgtacatttcatttataccgatgactgatgatgtagaactttctctagcaggttttaaatataatttagctagacaaatgcttaatataggttctactttaactatttccaatgaaattgagtctttgcaagcgaaagtaactgtacatgatgggttgattttgcaaattagaagtacagatttaaattaagtatattcaaatttgtgaggatttttaataaagtgcatgaggatttttaataaagtgcatgaggatttttaataaagtgcatgaggatttttaataaagtgacgtttatagatagaatttatagcattataatagatgaatcacgctgtaattaatgaagattatggcgtgatttattattgaaaggaaaattataggtcctagtacattgatttatgtgccgaaatcgatattgaacccataagtccaatttgacagagaatcattattaaacttattaaccaaattatactgatagttcgaatttcactatgaaccattatgtaatgtttggtaacaaaaaaagaactaagaggttgagctcttagttcttaagtaaatgcgtcctccacataaggtcacattttttatgtgcaatatatttattaaactctagttactttaccagattttaaagcacgtgcagaaacccaaacttttttaggtttaccgtcaactaggattctaactttttgaaggttagcgttccatctacgtttagtagagtttaaagcgtgtgaacgtctgttaccagtcgaagctttacgacctgttacgaaacattgtttacccatatgagtacctcctttaataaatataaatacacataactacttatatacttaattaagatagcatagtttcatttgaaaaacaatgaataattttcacataaaagtcaaaaatactgagttttgtgatataattgtagactgtgaagttatgtagtatgatattttagagaaataagtgaatgaaacatttaaaatttttatttaatgatactacatctattaaaagaaaacgcctatagataatcgtcatgagtgtaaattcagtatactcaaaatataataggtgatttaagcgtaagtcattctgataagttgtaccattgatattttataaaaataatcaatgaaacttaaagcgtttatgactacactaagtggtaaaattttaaaagtgattagggaaaacgaataataaactttgaaatttaggagggacaaagatatgacattagagatttcaaatgattacggtaaaattgatatttcaaacgaagtgattgcttcggttgtaggtggaaaggccgttgaatgttatggtattgtaggtatggcatctagacaacaagttagagatggtattgcggaaatactaggacatgaaaattatgctaaaggcatcaaagtaactgaaaataatggcgtagtggatatagatatgtacattattgtaagttatggtgtgaaaatatctgaagttgccaataatgtacaatcaacagtgaaatatactttggaaaaatcacttaatgtatcagtaaattcaatcaatatatatgtacaaggtgtacgtgtgaataatacaggcaagaaagcttaggaggacaacttgaaatgattagcaaaattaatggtaaattatttgccgatatgattatacaaggggcacaaaatttatctaacaatgcagatttggtagattctttgaatgtgtatccagtgccagatggtgatacaggaacaaatatgaatcttactatgacttcaggtcgcgaagaagtagagaataatttgtcgaaaaatatcggcgaattaggtaaaacattctcgaaaggtttactaatgggtgcaagaggtaactctggtgtcatcttgtcacaattattcagaggattttgtaaaaatattgaaagtgaatctgaaattaattcaaaattgttagctgaaagttttcaagctggtgttgaaacggcatataaagctgttatgaaaccagttgaaggtacaatacttacagttgcaaaagatgctgcgcaagctgcaatagaaaaagcaaataatactgaagattgtatagaattaatggagtacattattgtaaaagccaatgaatcacttgaaaacacaccaaacttattagctgtacttaaagaagttggtgttgttgatagtggcggtaaaggtttgttatgcgtttacgaaggattcttaaaagcgcttaaaggtgaaaaagttgaagccaaagttgcaaagatagataaagatgaatttgtacatgatgaacatgatttccatggtgtaattaatactgaagatattatttatggctattgtactgaaatgatggttcgttttggaaagaataaaaaagcctttgatgaacaagaattcaggcaagatatgagtcaatttggtgattctttattagtcattaatgatgaagaaattgtgaaagttcacgtgcataccgaatacccaggtaaagtgtttaattatggtcaacaatatggtgaattaattaaacttaaggttgaaaatatgagagaacagcaccgtgaagtgattcgaaaagaacagcacacagctaaaccgaaaatggaaacggttgaaacagcaattattactatttctatgggtgaaggtatttcagagatattcaaatcaatgggtgccacacatatcattagtggtggacaaacgatgaatccttctacagaagatatcgttaaagtcattgaacaatcaaaatgtaaacgtgcaattattttaccgaataataaaaatattttaatggcaagtgaacaagcagcgagtattgttgatgcagaagcagttgttattccaacgaaatctattcctcaaggtataagcgcactattccaatatgatgtggacgcaacacttgaagaaaataaagcgcaaatggctgattcagtaaataacgttaaatctggttcattaacgtacgctgttcgtgatacgaaaattgatggcgttgagattaaaaaagacgcgtttatgggcttgattgaagataagattgtaagcagccaaagtgatcaattaacaacggttactgagttgttaaatgagatgttagcagaagatagtgaaatattgactgtgattattggtcaagatgcagagcaagcagttacagataacatgataaactggatcgaagagcaatatccagatgtagaagtggaagttcatgaaggtggacaaccaatttatcaatatttcttttcagtagaataaaaatttaaaataaaaaactaccaatgataaatcatcagttggtagttttttattttgctattttagtgttattgcgggttaaaagtatcattctcgagttgctaacaatgtcatgttcaacttagtcatgataaaataaataacatactaaatgatacgtaaaatcaaataaaacataggtgatttattttggctaaagtaaacttaatagaaagtccatattctcttttacaattaaaaggtataggtcctaagaaaatagaagtattgcaacaactaaatattcatacagtggaagatcttgttctttatttgccaactagatatgaagataatacagtgattgatttgaatcaagcagaagatcaatctaacgttacgatagaaggacaagtatatacagctccagtagttgcattttttggaagaaataaatcaaaattaaccgttcatttaatggtaaataatattgctgtcaaatgtatttttttcaatcaaccgtatttaaaaaagaaaatcgaattaaatcaaactataactgttaaaggtaagtggaatagagttaaacaggaaattactggtaatagggttttctttaattcacaagggacacaaactcaagaaaacgcagatgttcaattagaaccagtctatcgtattaaggaaggtattaaacaaaagcaaatacgagaccaaattagacaagcgttaaatgatgtgacaattcatgaatggttaactgatgaactaagagaaaaatataaattagagaccttggactttactttgaacacattacatcatcctaaaagtaaagaggatttattacgtgctcgtagaacctatgcatttactgaattgtttttattcgaattacgtatgcaatggctaaatagattagaaaagtcatctgacgaagcaattgaaattgattatgacttagaccaagttaaatcatttattgatcgtttaccttttgaactaactgaagcacagaaatccagtgttaatgaaatttttagagatttaaaagcaccaatacgtatgcatcgattacttcaaggtgatgtaggttcaggaaaaacagtagttgctgcaatttgtatgtatgcgttaaaaacggctggttatcaatcagcattgatggtgccaactgaaattttagcagagcaacatgctgaaagtttaatggctttatttggagattctatgaacgttgcattgttaactgggtcagtaaaaggtaagaaacgaaagatacttttagaacaacttgaaaatggtacgattgattgtttaattggaacccatgctttgattcaagatgatgtgattttccataatgttggtttagtaattacagatgaacaacatcgatttggtgtgaatcaacgccagcttttaagagaaaaaggtgcaatgacgaatgtgttatttatgacagcaacgccgataccaagaacactagcaatatcagtttttggtgagatggatgtgtcttcaattaaacaattaccaaaaggtcgtaaacctatcattactacttgggcaaagcatgagcaatacgataaagttttgatgcaaatgacctcagagttgaaaaaaggtcgtcaagcatatgtcatttgcccgctaatagaaagttctgagcatctcgaagatgttcaaaatgttgtcgcattgtacgagtctttacaacagtattatggtgtttcccgtgtagggttattgcatggtaagttatctgccgatgaaaaagatgaggtcatgcaaaagtttagtaatcatgagatagatgttttagtttctactactgttgttgaagtaggtgttaatgtaccgaatgcaacttttatgatgatttatgatgcggatcgctttggattatcaactttacatcagttacgcggtcgtgtaggtagaagtgaccagcaaagttactgtgttttaattgcatcccctaaaacagaaacaggaattgaaagaatgacaattatgacacaaacaacggatggatttgaattgagtgaacgagacttagaaatgcgtggtcctggagatttctttggtgttaaacaaagtgggttgccagatttcttagttgccaatttagttgaagattatcgtatgttagaagttgctcgtgatgaagcagctgaacttattcaatctggcgtattctttgaaaatacgtatcaacatttacgtcattttgttgaagaaaatttattacatcgcagttttgactaattaccatgctgatttgtcaatttgagtgcaacacttcgttaattgagtgatatgacacttgaactatttaaatgtaaagtggtattttaacaatttataaatttccgactaaataatagctaaataatacagttatttgttgagtcggttaaatagaaagtgttatgatatgtgaggaatgtttaagactaggtactaaaaaatgaggggtgagacgttgaaactaaagaaagataaacgtagagaagcaatcagacaacaaattgatagcaatcccttcatcacagaccatgaactaagcgacttatttcaagtgagtatacaaacaattcgtttagatcgcacttatttaaacataccagaattaaggaagcgtattaaattagttgctgaaaagaattatgaccaaataagttctattgaagaacaagaatttattggtgatttgattcaagtcaatccaaatgttaaagcgcaatcaattttagatattacatcggattctgtttttcataaaactggaattgcgcgtggtcatgtgctgtttgctcaggcaaattcgttatgtgttgcgctaattaagcaaccaacagttttaactcatgagagtagcattcaatttattgaaaaagtaaaattaaatgatacggtaagagcagaagcacgagttgtaaatcaaactgcaaaacattattacgtcgaagtaaagtcatatgttaaacatacattagttttcaaaggaaattttaaaatgttttatgataagcgaggataaaattatggttaaattagcaattgatatgatgggtggcgacaatgcgcctgatatcgtattagaagccgtacaaaaggctgttgaagactttaaagatctagaaattatacttttcggtgacgaaaaaaagtataatctgaaccatgaacgaatcgaatttagacattgttctgaaaagattgaaatggaagatgagcctgttagagcgattaaacgtaaaaaagatagctcaatggtaaaaatggctgaagctgtgaaatctggtgaagcagatggatgtgtgtcagcaggtaatactggtgctttaatgtcagctggtttattcattgttggacgtattaaaggtgtagctagaccagctttagtagtaacattgccaacgattgatggaaaaggttttgtctttttagacgttggtgcaaatgctgatgctaaacctgaacacttattacagtatgcgcaactaggggatatttatgctcaaaaaattagaggtattgataatccgaaaatctcattattaaatataggtaccgagccagctaaaggtaatagtttaacgaaaaaatcatttgagttattaaatcaagatcattcattgaattttgttgggaatattgaagcgaagacattaatggatggcgatacagatgttgtagttaccgatggctatactgggaacatggtccttaaaaatttagaaggtactgcaaaatcaatcggtaaaatgttaaaagatacgattatgagtagtactaaaaataaattagcaggtgcaatattgaagaaagatttagcagaattcgctaaaaagatggattactcagaatacggtggttcagtattattaggattggaaggtactgtagttaaagcacacggtagttcaaatgctaaagctttttattctgcaattagacaagcgaaaatcgcaggagaacaaaatattgtacaaacaatgaaagagactgtaggtgaatcaaatgagtaaaacagcaattatttttccgggacaaggtgcccaaaaagttggtatggcacaagatttgtttaataacaatgatcaagcaactgaaattttaacttcagcagcaaagacgttagactttgatattttagagacaatgtttactgatgaagaaggtaaattgggtgaaactgaaaacacgcaaccagctttattgacgcatagttcggcattattagcagcgctaaaaaatttgaatcctgattttactatggggcatagtttaggtgaatattcaagtttagttgcagctgacgtattatcatttgaagatgcagttaaaattgttagaaaacgtggtcaattaatggcgcaagcatttcctactggtgtaggaagcatggctgcagtattgggcttagattttgataaagtcgatgaaatttgtaagtcattatcatctgatgacaaaataattgaaccagcaaacattaattgcccaggtcaaattgttgtttcaggtcacaaagctttaattgatgagctagtagaaaaaggtaaatcattaggtgcaaaacgtgtcatgcctttagcagtatctggtccattccattcatcgctaatgaaagtgattgaagaagatttttcaagttatattaatcaatttgaatggcgtgatgctaagtttcctgtagttcaaaatgtaaatgcgcaaggtgaaactgacaaagaagtaattaaatctaatatggtcaagcaattatattcaccagtacaattcattaactcaacagaatggctaatagaccaaggtgttgatcattttattgaaattggtcctggaaaagttttatctggcttaattaaaaaataaatagagatgttaagttaacatcaattcaaactttagaagatgtgaaaggatggaatgaaaatgactaagagtgctttagtaacaggtgcatcaagaggaattggacgtagtattgcgttacaattagcagaagaaggatataatgtagcagtaaactatgcaggcagcaaagagaaagctgaagcagtagtcgaagaaatcaaagctaaaggtgttgacagttttgcgattcaagcaaatgttgccgatgctgatgaagttaaagcaatgattaaagaagtagttagccaatttggttctttagatgttttagtaaataatgcaggtattactcgcgataatttattaatgcgtatgaaagaacaagagtgggatgatgttattgacacaaacttaaaaggtgtatttaactgtatccaaaaagcaacaccacaaatgttaagacaacgtagtggtgctatcatcaatttatcaagtgttgttggagcagtaggtaatccgggacaagcaaactatgttgcaacaaaagcaggtgttattggtttaactaaatctgcggcgcgtgaattagcatctcgtggtatcactgtaaatgcagttgcacctggttttattgtttctgatatgacagatgctttaagtgatgagcttaaagaacaaatgttgactcaaattccgttagcacgttttggtcaagacacagatattgctaatacagtagcgttcttagcatcagacaaagcaaaatatattacaggtcaaacaatccatgtaaatggtggaatgtacatgtaatatatttgagctaaagctcaagataaagacgtagtaatcaataaattgataactgataagcggaacgcttgagctaaagctcaagataaagacgcagtaatcaataaattgataactgggatagaggtacgcctgagctaaagctcatgcataagaaacactaatcaataaattgataagtgtttctaaaatttctacttgttttttagaatttaaaatgggaaaatatagtagtctatgtataggcatttttaaaggaggtgaatcgacgtggaaaatttcgataaagtaaaagatatcatcgttgaccgtttaggtgtagacgctgataaagtaactgaagatgcatctttcaaagatgatttaggcgctgactcacttgatatcgctgaattagtaatggaattagaagacgagtttggtactgaaattcctgatgaagaagctgaaaaaatcaacactgttggtgatgctgttaaatttattaacagtcttgaaaaataataaatcttacatctgggtcgtcagtattgtcgactcagtttttttctttaattatcaatagttttaacgtaaaattaaagatgattcaagagcaacacataaaggagataaaataatgtctaaacaaaagaaaagtgagatagttaatcgttttagaaagcgctttgatactaaaatgacagagttaggctttacttatcaaaatattgatttataccaacaagcattttcgcattcgagttttattaatgattttaatatgaatcgtttagaccataatgagcgtttagagtttttgggtgatgcggtattagaattgacggtttcacgatatttatttgataaacatcccaacttgccagaagggaatttaacaaaaatgcgtgccactattgtatgtgagccctcacttgtaatatttgcgaataaaattggattgaacgaaatgattttacttggtaaaggtgaagagaaaacagggggacgtacaagaccatcattaatatcagatgcattcgaagcatttattggggcattgtatttggatcaaggactagatatagtttggaaatttgctgagaaagtcattttcccacatgtagaacaaaatgagttattaggcgtggtagattttaaaacacaattccaagaatatgtgcaccagcaaaataaaggtgatgtaacctataatttaataaaagaagagggaccggcacatcatcgtctattcacttcagaagttattctgcaaggggaagcaatagctgaaggtaaagggaaaacgaaaaaagaatcagaacaacgtgctgctgaaagtgcctataagcaattaaaacaaattaaatagaaatttatatgatacgacatataggtgttcgatttaggatttaaggaagaatttttaatattttatggaacaacttcgaaatttaatatacaaatactaaaatatcgtatacatgtgttctttaaaattgtgataaggagtttaggatggtttatttaaaatcaatagatgccattggatttaagtcttttgcagatcaaaccaatgttcaattcgataaaggtgtaactgcaattgttggtccaaatggaagcggtaaaagtaatattacagatgctattaaatgggtgttgggtgaacaatcggctaaatcattacgtggctcaaaaatggaagatattatcttctcaggtgcagaacatcgcaaagctcaaaattatgctgaagtacagttaagattagataatcattctaaaaagctcagtgttgatgaaaacgaagttattgtaacaagaagattgtatcgaagtggtgaaagtgagtactacataaataatgaccgtgcaagattaaaagatattgccgatttatttttagattctggattgggaaaagaagcgtatagcattatctcgcaaggtagagttgatgaaatactaaatgctaaaccaattgatagacgtcaaattattgaagaatcggctggtgtacttaaatataaaaaacgtaaggctgaatcattaaataaacttgaccaaacagaagataatttaacgagagtagaagacattttatatgatttggaaggtcgcgtagaacctctaaaagaggaggcagctatagctaaagaatataagacactttcacatcaaatgaaacatagtgacattgtagttacagtgcacgatattgatcaatatacaaatgacaatagacaattagatcaacgtttaaatgatttacaaggccaacaagcaaataaagaagctgacaagcaacgtttaagccaacaaattcaacaatataaaggtaaacgtcatcaacttgataatgatgttgaatcgcttaattatcaattagtaaaagctacggaagcctttgaaaaatatacgggacaattaaatgttttagaagaacgtaagaaaaatcaatctgaaacaaatgcacgatatgaagaagaacaagaaaatttaattgagcttttagaaaatatatcaaatgagatttctgaagctcaagatacttataagtctctgaaaagtaaacaaaaagaactcaatgctgtcattcgtgaattagaagaacaactatatgtttcagacgaagcacatgatgaaaaattggaagaaattaaaaacgaatactatacattaatgtcagagcaatcagatgttaacaatgacattcgttttttaaagcatactatagaagagaatgaggctaaaaaatcaagactagattctcgattagttgaagtctttgagcaattgaaagatattcagggtcaaataaaaacgactaaaaaagaatatcaacagaccaacaaagaactttctgctgtagataaagaaattaaaaatatagaaaaagaactcactgatacaaaaaaagcacaaaacgaatacgaagagaaattgtatcaagcatatcgatataccgaaaaaatgaaaacacgtattgatagtttggcaacgcaagaggaagaatatacttattttttcaatggcgtcaaacatattttgaaagctaaaaataaagaattaaagggcattcatggtgcagttgcggaaattattgatgtgccatctaaattaactcaggcaattgaaacagcattaggtgcttcattacaacatgtcattgtagattcagaaaaagatggacgccaggctattcaatttttaaaagaacgtaatttaggtcgtgcgacgtttttaccattaaatgttatacagagtagagtggtagcgactgaaattaagtctattgctaaagaggcaaacggatttattagtattgcttcggaagcagtgaaagtagcaccagaatatcaaaatattatcgggaatttattaggtaatacgattatcgttgatcatttaaagcatgcaaatgaattggcacgtgcgattaaatatcgaactcgtattgttactttggaaggtgatattgtaaatcctggtggttctatgactggtggtggcgctcgtaagtcaaaaagtattctgtctcaaaaagacgagttgacaacaatgagacaccaattagaagattatttgcgtcaaacagaatcatttgaacaacaatttaaagagttgaagataaaaagtgatcaattaagtgaactgtattttgaaaaaagtcaaaagcataatacacttaaagagcaagtgcatcattttgaaatggagctcgatagattaactacacaagaaacacaaataaaaaatgatcatgaagaattcgaatttgaaaaaaatgatggttatacgagtgacaaaagtcgacaaactttgagtgaaaaagaaactcatttagaaagtattaaagcatctttaaaacgactagaagatgaaattgaacgctacacaaaactttctaaagaaggtaaggaaagcgtaactaaaacacaacaaacgttacatcagaaacaatctgatcttgctgtggttaaagagcgtattaaaacacaacaacagacaatagatcgattaaataatcaaagtcaacaaaccaaacatcaattaaatgatgttaaagaaaaaatagcattctttaattcggatgaagtgatgggcgagcaagcttttcaaaatattaaagatcaaattaatggtcaacaagaaacgagaacacgcttatctgatgaattagataaattgaaacaacaacgtattgagttgaatgaacaaatcgatgcgcaagaagctacactacaagtttgtcaccaagatattttagctatcgaaaatcactaccaagatattaaagctgaacaatcaaagctagatgtattaattcatcatgcgatagatcatttaaatgatgaatatcaattgactgttgaacgtgcgaaatctgaatatacgagtgatgaatcgattgacgcattacgtaaaaaagttaagttaatgaagatgtcgattgatgaactaggtcctgtaaacttaaatgcaattgaacaatttgaagagttaaatgaacgttatacatttttaagtgaacaacgtacagatcttcgtaaagctaaagaaacattagagcaaattataagtgaaatggatcaagaggttactgaaagatttaaagaaactttccatgctattcaaggacattttacagctgtgttcaaacaattgtttggtggaggcgatgcagaattgcaattaactgaagccgattatttaacagctggtattgatattgtggtacaaccaccgggtaaaaagttgcaacatttatcgttactgagtggtggtgagcgtgcattaactgctattgctttactatttgcaattttaaaagtaagatctgcaccttttgttatattagatgaggttgaagctgcactagatgaagcaaatgttattagatacgcaaaatatttaaatgagttatcagacgaaacacaattcattgttattacacaccgtaaaggaacaatggaatttgcagataggttatacggtgtaacaatgcaagaatcaggtgttactaaacttgtgagtgtgaatttaaatacaatagatgatgtgttgaaggaggagcaataatgagcttttttaaacgcttaaaagataagtttgcaacaaataaagaaaatgaagaagttaaatccttaacagaagaacaaggtcaagacaaattagaagatacacattctgaaggttcaacgcaggacgtaaatgatttagcagaaaatgctgaagtgaaaaagaagccacgcaagttgagtgaagcggattttgatgacgatggcttaatatcaattgaagattttgaagaaattgaagctcaaaaaatgggggctaaatttaaagcaggactcgaaaaatctcgtcaaaatttccaagaacaattaaataatttgatagcgagatatcgtaaagtagatgaagacttttttgaagctttagaagaaatgttaatcactgcagacgtcggttttaatacagtgatgacgttaactgaagaattacgtatggaagcacaacgacgtaatattcaagatactgaagatttgcgtgaagtcattgttgaaaaaatcgtagagatttaccatcaagaagatgataattcagaagctatgaacttagaagatggtcgtttgaatgtcattttaatggtcggtgtgaatggtgttggtaaaacaacaacaattggaaaattagcttaccgatataaaatggaaggtaaaaaagtaatgttagctgcgggcgatacttttagagcgggtgctattgatcaattgaaagtttggggcgaacgtgttggtgtagacgtaattagccaaagtgaaggttctgatccagctgctgttatgtatgatgcgattaatgccgctaaaaacaaaggtgttgatattttaatctgtgataccgctggacgtttacaaaataaaacaaatctaatgcaagaattagaaaaagttaagcgtgtaattaatcgagcagtgccagatgcgcctcatgaagcattactatgtttagatgctacaactggtcagaatgcgttgtcacaagctagaaactttaaagaagtaacaaatgttacaggtattgtattaacgaaattagatggtacagccaaaggtggtatcgtattagccattcgtaatgaattgcacattccagttaaatatgtaggtttaggtgagcaattagatgacttacaaccatttaaccctgaaagttatgtctacggcttattcgctgatatgattgaacaaaatgaagaaataacaacagttgaaaatgatcaaattgtaacagaagaaaaggacgataatcatgggtcaaaatgatttagttaaaacgttacgaatgaattatttgtttgatttttatcaatccttattgacgaataaacaacgtaattatttggaattattttatctcgaagattattctttaagtgaaatcgcagatacttttaatgtgagtagacaagcagtttatgataatataagaagaactggcgatttagttgaagattatgaaaagaaattggaattataccagaaatttgagcaacgccgagaaatatatgatgaaatgaaacaacatttaagtaatccagaacaaatacaacgttatattcaacaattagaagacttagaatagatataaattgagggaggacatcgatatggcatttgaaggcttatcagaacgcctgcaagcgacgatgcaaaaaatgcgtggtaagggtaaacttactgaagctgatataaagataatgatgcgtgaagtaagattagcgttacttgaggctgacgtaaactttaaagtggtaaaagaatttattaaaacagtatcagaacgcgcattaggttccgatgtaatgcaatcattaacaccagggcaacaagttattaaaatagttcaagatgaattaacgcagttgatgggtggagaaaatacgtcgattaatatgtcaaataaaccacctactgttgttatgatggttggtttacaaggtgctggtaaaacaacaactgcaggtaaattagcattattgatgcgtaaaaaatacaacaaaaaacctatgttagttgcagcagatatttatcgtccagcagcgataaatcaattacaaacagtagggaaacaaattgatattcctgtatacagtgaaggagatcaagtaaagccacaacaaattgtaactaatgcattaaaacatgccaaagaagaacatttagactttgtaatcattgatacagcaggtcgattacacatcgatgaagcattgatgaacgaattaaaagaagtaaaagacattgctaaaccaaacgaaattatgttagttgtcgattcaatgacgggtcaagatgctgtcaatgttgcagaatcttttgacgatcaacttgatgtcacaggtgttaccttaactaaattagatggtgatacacgtggtggtgcagctttatctattcgttcggtgacacaaaaaccaattaaatttgttggtatgagtgaaaagttagatggtttagagctattccatcctgaacgtatggcatcacgtattttaggtatgggtgatgtgttaagtttaattgaaaaagcgcaacaagatgtggatcaagaaaaagcaaaagatttagagaaaaagatgcgtgagtcatcgtttactttagatgattttttagaacaacttgatcaggtgaaaaatctaggaccactggatgatattatgaaaatgattccaggtatgaataaaatgaaagggctagataagcttaatatgagtgaaaagcaaattgatcatattaaagcgattatccagtcaatgacgccggctgaaagaaacaatccagacacattgaatgtatcacgtaaaaagcgtattgctaaagggtctggtcgttcattacaagaagtcaatcgtttgatgaaacaatttaacgatatgaagaaaatgatgaaacaattcactggtggcggtaaaggtaaaaaaggtaaacgcaatcaaatgcaaaatatgttaaaaggtatgaatttaccgttttaatgtttaatataacacgctgatttttgttgcaatgagatgtgcatcccgaaagttatactaaagaatataactttatggggtgcatatttttagatacacaataataattaaaaactgaaattgcggatttgctagaacatgaggttattgttgctaatattaataagttatattggtggaacatgtgcgttagaagtggtaccattcatgtccttacgagataaattaacttaacacgtaggtggtgaaatttactatgaatttttataacctattaacagtctaatttagtaatcacatagttattattgtaagaaaaaggttcaataattttcctggtaaagaaaaaactctttacaaacattcatacacctgttaatattatttcttgtagaaaataaaaattaaaacatgacttaaaggagattttataaatggcagttaaaattcgtttaacacgtttaggttcaaaaagaaatccattctatcgtatcgtagtagcagatgctcgttctccacgtgacggacgtatcatcgaacaaatcggtacttataacccaacgagcgctaatgctccagaaattaaagttgacgaagcgttagctttaaaatggttaaatgatggtgcgaaaccaacttatacagttcacaatatcttatcaaaagaaggtattatgaaaaaatttgacgaacaaaagaaagctaagtaatttagcgtaaaattgttctaacaataagaataactcgtttacactgacagttattactcaatgatacgttgggaatatcacatgttagtaatatagaacgtattgggtaccataatggtgccctttttctttgaattattttcaattaaaatagaagtgttcaaagcatagagttggaggtaatagaatgagagttgaagttggtcaaattgttaacacacatggtattaaaggtgaaattaaagtaaaatccaattcagactttacagacgttcgttttcaacccggtcaagtgctgacagttgtgcataacaataacgaccttgaatatactgttaagtcacatagagtgcataaagggcttcatatgctcacatttgaaggtattaataatattaatgatattgagcatctaaaagggagttctatttatcaagaacgtgatcatgaagatatcgtacttgaggaaaatgaattttattattcagatattataggatgtacagtttttgatgatcaagaaacaccaataggtcgtgtaattaatatatttgaaacaggtgcgaatgatgtgtgggtgattaaaggatctaaagaatatttgattccttatattgctgatgttgtaaaagaagtggatgttgaaaataaaaaaattatcatcacgccaatggaaggattgttggattaatgaaaattgattatttaactttatttcctgaaatgtttgatggtgttttaaatcattcaattatgaaacgtgcccaagaaaacaataaattacaaatcaatacggttaattttagagattatgcaattaacaagcacaaccaagtagatgattatccgtatggtggcggacaaggtatggtgttaaagcctgaacctgtttttaatgcgatggaagacttagatgtcacagaacaaacacgcgttattttaatgtgtccacaaggcgagccattttcacatcagaaagctgttgaattaagcaaggctgaccacatcgttttcatatgtggacattatgaaggttacgatgaacgtatccgaacacatcttgtcacagatgaaatatcaatgggtgactatgttttaacaggtggagaattgccagcgatgaccatgactgatgccattgttagactgattccaggtgttttaggtaatgaacagtcacatcaagacgattcattttcagatggattattagagtttccgcaatatacacgtccgcgtgaatttaagggtctaacagttccagatgttttattgtctggaaatcatgccaatattgatgcatggagacatgagcaaaagttgatccgcacatataataaaagacctgacttaattgaaaaatatccattaactaatgcagataagcaaatattagaaagatataaaataggattgaaaaaaggttagtattgtgctaacataatctgagtgtggaaacacaaaaatcactatgatccgctgctatatatttgtcgaggcaagaacataggttgaagaggagaatttataatgacaaatcacaaattaatcgaagcagtaactaaatcacaattacgtacagacttaccaagtttccgtcctggtgatactttacgtgtacacgtacgtatcattgagggtactcgtgagcgtatccaagtattcgaaggcgttgtaattaaacgtcgtggcggtggcgtttctgaaacgtttacagttcgtaaaatttcatcaggtgttggcgtggaacgtacattcccattacacacaccaaaaattgaaaaaatcgaagttaaacgtcgtggtaaagtacgtcgtgctaaattatattacttacgtagtttacgtggtaaagctgctagaatccaagaaattcgttaatcagcatttaaacaaagctatgtatgagtcaaattcgactcaaacaataaagccatctaggtcacttttatggagtgatatagatggctttttttgctgtttagttaatgtaaagttgataatgtaattgcttttttcgccattcgtaaagattttgtcaaagtggttaaataaacaaaaatctactaagtgtcatgaaaaaggacttagtagatttattaaatatatgcgtagcaacattatttttgtcttgcccatctcgtgaaaataatactacatataatgcctaatatagtaattgttataagtaaataatagtatggtggggtatagctcaattgaatctttgttatatttttaggtgctttaatgccggtcataacaccatttacttgttcaactttaagactttgatcacctgatgtcgctttcataccttgattatatgctgtcggcaaaacaatatacccagatgaatttttatttttagtaatagtataaccttgctttgtcttactaactttgacagcctctaatgaatttgaagtgtctttaagcgtggtataatcttcgccgtatatcccttttaaatttactcgatacttacctttaggcaatgataatctaattctatctgaagctttaatgcgtatcgttacgggtgttacaaagcgtcgatatttataagtgagtttatttctttcttgtgtatattcattcactttaacatcatgagctttatccggcgaaagtaattctaaatccatttcaaaatacaaatctttaaattgattagaaactgattttggcaactgtacagttagaccaccattattttgtttaacttgtaataaatgttttgtgggagattgccaggctgcactatttaatttaattgttgagtctgatagtaaatttttattggctttaaaatgtgtattaacatctttagtattgttagaaacaatcccttgcaacattgcttgttctttatctaatggagattttaattctttatttgaaaagaccttatttgtaatatgtgcacttggataatggatggtatttttagaatgaatccaacgaactttattgtctttgtgttcagagttaattttaaatccatatggtaagttgtcatcatgatttactctaattcgatcattaacattccaaagtgatagtaaattttgacgattgccaagtaatctataagtgctgtttttatcgattggcatattaatttggagtgtcttgtcataatattttaaaatgtctccattaaaaatactagaatataatgaaatgccattataatgatatataaatggtgaatttaatgcatagtctgacatataatcaatgcgattaaatgggcctgttgcattttgatttatcttttttataagctggtttacatagttactatgataatcatgttgtttcaacgttgatattgattgttgataaggtttgattgccatatttttgttgttatctaaaatgacgatttgttgaatcataacgattaatactaatattgcaacggttaattttttataacgccataaactaaattttaaaataacggcaagcaccattagcaggataatacctactataagtgcaagtgggtgtgtcggtgatagtaatacataaagtaatgcgatgatgcatacgggtattgttctgattaaataatatttcatatttaatgttgataaatgttgaataaacaatccgcaaagagcacttgatgatagtgctaagatatacacccaacgcctttctggaaatgaaaaaccattaaaagcactgtcgaaatactgtgataatgaacctataaataatatccatgttactattgcgaaaagtctataaaagtaaaaacgatacagtttgaatgacaataatgcaacgatagtaagaattgaaatcgtaatataaaatccatcgctaaagaaaaaataatgataatcaagtggtgtcaaaaacggtatatcaacattgggattttgctttctgtcattttccaaaaacgcagaaatgccagtgaataaaccaaatacacttgataacacactcaaaactgtagcagatatgacgcaaattaatttttgtgttctagagacaatgtcatatttgtaagtgaaaatgagtcgatataaatagtagcaacctataataatagcttgataataactgaaataaaaattgctaaatagtgttaaggctatcgcaacaatgaatataccgattttgcgttgttgaaaatatctttccaaaccaagaatcgataatggtaataaatataataaatttccataaaatgaccaagtaaaattaaagtatataacgacagttgacatgccgtataaaatcgtagcgatcatatttgttgagcgtttaaagtgtaatattttaaataagtagaaggtcacgacaaatgttatgatagctcgtatcatggccataataagttggtttgtcggccaaaaatgtattgttgtcggattaaatataccaaccgtttctcctattttaatgaatagaaaatttagccacattaaaggtgacagcgaataataatatgatagtcctttcatataatcgccacctaatccaaacgatgcatcatataaactagaaaaactacttaaatgttcatacaaatacatttgaaatggcatcatttgacggaatccatctccagccccactaaaaacagtaccattcacaatataatcatagatatgagtagaaaataaaataagcgttaatattacactaatgaaagttataacaaagaattgtttgacgtttgaatttagccacttttttaacacaacattatcctcaactttcaaatttaaaattaagtttaactgaaactaaagttaatgaggttcttgataggtaaagacgaagatgactgtggaacagataccttatcatagttacttaaactttggatcattttcagtttatcattaaacaaatatattgaataataaaaatgtcatgctgataaagatgaatgtcacttaataagtaacttagatttaacaaatgatgatttttaattgtagaaaacttgaaataatcacttatacctaaatctaaagcattgttaagaagtgtgacaatgttaaaataaatatagttgaattaatgaatttgttctataattaacaggttatagattttaataatgagaaaagaattgacgaaagtaaggtgaattgaatggttattcaatggtatccaggacatatggcgaaagccaaaagagaagtaagtgaacaattaaaaaaagtagatgtagtgtttgaactagtagatgcaagaattccatatagttcaagaaaccctatgatagatgaagttattaaccaaaaaccacgtgttgttatattaaataaaaaagatatgtctaatttaaatgagatgtcaaaatgggaacaattttttattgataaaggatactatcctgtatcagtggatgctaagcacggtaaaaatttaaagaaagtggaagctgcagcaattaaggcgactgctgaaaaatttgaacgcgaaaaagcgaaaggacttaaacctagagcgataagagcaatgatcgttggaattccaaatgttggtaaatccacattaataaataaactggcaaagcgtagtattgcgcagactggtaataaaccaggtgtgaccaaacaacaacaatggattaaagttggtaatgcattacaactattagacacaccagggatactttggcctaaatttgaagatgaagaagtcggtaagaagttgagtttaactggtgcgataaaagatagcattgtgcacttagatgaagtagctatatatggattgaactttttaattcaacatgacattgaacgcttaaaagcacattataaaattgacgttccagaatatgcagaaattttagcgtggtttgatgcgatagggaaaaagcgtggcttaattcgacgtggtaatgaaattgattacgaggcagtcattgaattgattatttacgatattcgaaatgctaaaataggaaattactgttttgatatatttaaagaaatgaccgaggaattagcaaatgacgctaacaattaaagaaataacgcaagtaattaatacgatcaatacaatagaagaattagaaaatcatgaatgctttttagatgagcgaaaaagtgttcaaaacgccatagctaggcgcagaaaagcgttagaaaaagaacaagctttaaaagaaaagtatgttgaaatgacttactttgaaaatgaaatattaaaagagaatcctaatgctattatttgtggtattgatgaagttggaagagggcctttagcaggtccagtcgttgcatgcgcaacaattttaaattcaaatcacaattatttgggccttgatgactcgaaaaaagtacctgttacgaaacgtctagaattaaatgaagcactaaaaaatgaagttactgcttttgcatatgggatcgcgacatctgaagaaatagatgaatttaatatttataaagctactcaaatcgccatgcagcgagctattgatggattatcagtacaaccaacgcatttattgatagacgcgatgacgcttgataatgcactgcctcaagtatctttaatcaagggtgatgcaagaagtgtgtccattgcagctgcaagtatcatggcaaaggtttttcgtgatgattatatgacacagttatctaaagattatcctgaatacggttttgaaaaaaacgcgggttatggtaccaaacaacatttactagcaatcgatgatattggcattatgaaagagcatagaaaaagctttgaacctataaaatcgttactgtaaatcgtaaaattcaattaaatgataaaaaagtagcatttaagtttacaatagcgcttacattttttataattgtaagggaacttaacctaagtaacaggaggatggaagatgaatatccacgagtatcaaggtaaagaaatatttcgttcaatgggcgttgcagttccagaaggacgagtagcatttactgctgaagaagcggtggagaaagcaaaagaattaaattctgatgtttatgttgtaaaagcacaaattcatgctggaggtagaggtaaagcaggcggagtaaaaattgctaaatctttatcagaggtagaaacatatgcaaaagaattattagggaaaactttggtgacacatcaaactggtccagaaggtaaagaaattaagcgtttatatatcgaagaaggttgtgctattcaaaaagaatattacgttggattcgttattgatcgtgcgactgaccaagtaacattgatggcgtctgaagaagggggcactgagattgaagaagttgctgcgaagactcctgaaaagatcttcaaagaaactatcgatccagtaatcggactttcaccattccaagcaagacgaattgcgtttaatattaatattcctaaagaatctgttaacaaagcagctaaattcttattagcactttataatgtattcattgaaaaagattgttcaatcgtagaaatcaacccattagttacaacagctgatggtgatgtattggcattagatgctaaaattaattttgacgataatgcattattcagacataaagatgttgtagaattacgtgatttagaagaagaagatccgaaagagattgaagcgtctaaacatgatttatcatacattgcattagatggtgacatcggatgtatggttaatggtgcaggtttagccatggcaacaatggatacgattaatcatttcggtggaaacccagccaatttcttagatgcaggcggaagcgctactagagaaaaagtaactgaagcatttaaaatcattttaggtgatgaaaatgttaaaggtatttttgtaaatattttcggtggcattatgaaatgtgatgttatcgcagaaggtatcgttgaagctgtaaaagaagtagatttaactttaccactagttgtacgcttagaaggtacaaatgttgagttaggtaaaaaaatcttaaaagactcaggattagcaattgaaccagcagcaacaatggctgaaggtgcacaaaaaattgttaaactagtcaaagaagcataaggaaaggatgggagcactaagatgagtgtatttatagataagaatactaaagtaatggtacaaggtattacagggtctactgcccttttccatacaaaacaaatgcttgattatggtacgaaaatagtagcaggtgtgacgcctggtaaaggtggtcaagttgttgaaggcgttcctgttttcaacactgttgaagaagctaaaaatgaaaccggggcaacggtttcagttatttacgttccagcaccatttgctgcagactcaattttagaagcagcagatgcagacttagatatggttatttgtattactgaacatattcctgtattagacatggttaaagttaaacgctacttacaaggtagaaaaacacgtttagttggtccaaactgtccaggtgtgattacagcagatgaatgtaaaattggtattatgcctggctatattcacaaaaaaggtcatgttggtgtagtatctcgttcaggtacattaacatatgaagcagtgcaccaattgactgaagaaggtattggtcaaactacagctgttggtattggtggagacccagtcaacggaacaaactttattgatgttttaaaagcattcaatgaagatgacgaaacgaaagcagttgttatgattggtgaaatcggtggtacagctgaagaagaagcagctgaatggattaaagcgaatatgacaaaaccagttgtaggctttatcggtggacaaacagcacctcctggaaaacgtatgggacatgctggtgcaatcatttcaggtggtaaaggtactgctgaagagaaaattaaaacattaaatagttgtggtgtgaaaacagcggcaacaccttcagaaattggttcaacattaattgaagctgctaaagaagcaggtatttatgaagcattattaactgttaataaataaagttaaaagatgatataaatggctatagcccattccatactttataaaagtatcggaaatgggctatttgtcgtgcaatgaattttagtacacttttcatattttggaaaggcaagttaattattttacctcctacaatagctttataaaacaaagtaaattttaattaaaatatatagtgcactatgttataatgtttatatattattgtaaggagtgtttcatcatgaataaacaacaaagtaaagtacgctattcaattagaaaagttagtattggaattttgtctatttcaataggtatgtttttggcattgggtatgtcgaacaaagcatatgcagatgaaattgataaatctaaagattttacaagagggtatgagcaaaatgtattcgcgaaatcagagttaaatgctaataaaaatacgacaaaagacaaaataaaaaatgaaggtgctgttaaaacatcggacacaagtttaaagttagacaacaaatcagcaatttcaaacggaaatgaaattaatcaagatataaagatttcaaatactccgaaaaactcaagccaaggtaacaatctagttgttaataacaatgaacctactaaagaaattaaaattgcaaacttggaagctcaaaattctaatcagaagaaaatgaataaagttactaataattactttggttactacagttttagagaagctccaaaaacacaaatctatactgtaaaaaaaggagacacacttagtgctatagcattaaaatacaaaactacagtttcaaatattcaaaatacaaataatatagcaaatcctaatttaatatttattggtcaaaaattaaaagtgccaatgacaccattagtagaaccaaaaccaaaaacagtgtcttcaaataataaaagtaatagtaatagcagtacattaaattatttgaaaacattagagaatagaggatgggatttcgacggtagttatggatggcaatgtttcgatttagttaatgtatattggaatcatatttatggtcatggattaaaaggatatggagctaaagatataccatatgcaaataattttaatagtgaagctaaaatttatcacaacacaccaactttcaaagctgaacctggggacttagtggtttttagtggaagatttggtggaggatatggtcatacagctattgtcttaaatggtgattatgatggaaaattaatgaagttccaaagtttagatcaaaactggaataatggtggatggcgtaaagcagaggttgcacataaagttgttcataattatgaaaatgatatgatttttattagaccatttaaaaaagcataatttaaatcgaaggcaggacattgaaatatgaaattttcaactttaagtgaagaagaatttaccaactacaccaaaaagcacttcaaacattatacacagtctatagaattatataattatagaaataaaataaatcatgaagcacatattgtgggagtgaagaatgataaaaatgaagttatagctgcatgtttattaacagaggcacgaatttttaaattctacaaatatttctactctcatagaggtcctttacttgattatttcgatgctaaattagtttgttacttttttaaagaattatctaaattcatttataaaaatagaggagtatttattcttgttgatccatatttaatagagaatttaagagatgcaaatggtaggataataaagaattataataattcagtgatagtaaagatgctagggaaaattgggtatctccatcaaggttatacaacaggatattcaaataaaagtcaaattaggtggatttctgtattggatttaaaagataaagatgagaatcaacttttaaaagaaatggaataccaaactagaagaaatataaaaaagactattgagattggtgttaaggttgaagatttatctattgaagaaacaaatcgattttataaattgtttcaaatggctgaagaaaaacatggttttcatttcatgaatgaagattattttaaacgaatgcaagaaatatataaagataaggcaatgttaaagatagcttgtataaatcttaatgaatatcaagataaattaaaaatacaattattgaaaatcgaaaatgaaatgatgactgtgaacagagcattaaatgaaaatccaaattctaaaaagaataaatcaaaattaaatcagttaaatatgcaattatctagtattaataatagaattagtaaaaccgaagaactaatattagaagatggacctgttttggatttagctgctgctttatttatatgtactgatgatgaagtttattatctatcaagtggatcaaatccgaaatataatcagtatatgggtgcatatcatctacaatggcatatgataaaatatgcaaaatcacataatattaataggtataatttttatggaataacaggcgtctttagtaatgaggcggatgattttggtgttcaacaatttaaaaagggttttaatgcacatgttgaagaattaattggtgatttcatcaaaccagtaagaccaattctatataaatttgcaaaacttatttataaggtttgattataaagtatgttggaaattgaaatttaaaattctttccaacatacttttcactttttaagtcagtatttttactccttaaaataacattacatcgacaatgtttttgtattagaaatgtaaaacaaaaatagaatatgattttgtatgattacaaaaaggagttgatttattgattaaactatttttgcttaagttatactgggcacacttttcgactaaacaaattcatcaatttttaatggcatatcctaatgtaattaaagaggagggaagaaaaaaagatagttatttatgtgaatgggtgaatagggaagaaaatgttcatttattacgtaaatactatgcttttataaaacttgatcataacgatattattaaagaactgcagaaattaaaagtaagttacattacatatatggattctgaatacccagtgctattaaaagaaatatatcaatttccattacttcttttctataaagggaacatcaaattaataaataatatgcatcatttggcagtagtaggtgcaagagattctacaagttatacccaacagtctttagaatttttattatcaaatgataaaagcaaatatttaacaattgtttccggccttgctcaaggagctgatgcaatggcacatcaaatagctttaaaatacaatctccctacaattgcagttttagcctttggccatcaaacacattatcccaaaagtacattagcattaagaaataaaatagaagaaaaaggtttagttatatccgaatatccaccacatacaccaattgctaaatatagatttcctgagcgcaatagaattatcagcggtttgtcaaaaggggttttaattactgaggctaaggaacaaagtggcagtcacatcacgatagattttgcattagagcaaaatagaaatgtttatgttttacctggatctatgtttaatcctatgacaaaaggtaatttattacgtatccaagaaggtgctaaggtagtattaaacgctaatgatatatttgaagactactatatttaaaactaaaaataacgagttgcttcatatttcttttgttaccctttgtaatttattttttaataaaatctataaaaaatagacagggaaaatgatttgtttagatataaaacgttgacaaaagcaaaattaagcgtttatcatttatctttagtaattagattagcgagggggaaatgacattggcagataatttagtcattgttgaatcgcctgcaaaagcaaaaaccattgaaaagtatttaggtaagaaatataaagttatagcttcaatgggacacgtcagagacttaccaagaagtcaaatgggtgtcgacactgaagataattacgaaccaaaatatataacaatacgcggaaaaggtcctgttgtaaaagaattgaaaaaacatgcaaaaaaagcgaaaaacgtctttctcgcaagtgaccccgaccgtgaaggtgaagcaattgcttggcatttatcaaaaattttagagcttgaagattctaaagaaaatcgcgttgttttcaacgaaataactaaagacgctgttaaagaaagttttaaaaatcctagagaaattgaaatgaacttagtcgatgcacaacaagcgcgtcgaatattagatagattggttggctataacatctcgccagttctatggaaaaagtaaaaaaaggtttgtcagcgggtcgagttcaatctgttgcacttcgtttagtcattgaccgtgaaaatgaaattcgaaactttaaaccagaagaatattggactattgaaggagaatttagatacaaaaaatcaaaattcaatgctaaattccttcattataaaaataaaccttttaaattaaaaacgaaaaaagatgttgagaaaattacagctgcactagatggagatcaattcgaaattacaaacgtgactaaaaaagaaaaaacgcgtaatccagcaaacccatttacaacttctacattacaacaagaggcggcacgtaaattaaactttaaagcaagaaaaacaatgatggtcgcacaacaattatatgaaggtatagatttgaaaaaacaaggtacgattggtttaataacatatatgagaaccgattctacacgtatttcagatactgccaaagctgaagcaaaacagtatataactgataaatacggtgaatcttacacttctaaacgtaaagcatcagggaaacaaggtgaccaagatgcccatgaggctattagaccttcaagtactatgcgtacgccagatgatatgaagtcatttttgacgaaagaccaataccgattatacaaattaatttgggaacgatttgttgctagtcaaatggctccagcaatacttgatacagtctcattagacataacacaaggtgacattaaatttagagcgaatggtcaaacaatcaagtttaaaggatttatgacactttatgtagaaactaaagatgatagtgatagcgaaaaggaaaataaactgcctaaattagagcaaggtgataaagtcacagcaactcaaattgaaccagctcaacactatacacaaccacctccaagatatactgaggcgagattagtaaaaacactagaagaattgaaaattgggcgaccatcaacttatgcaccgacaatagatacgattcaaaagcgtaactatgtcaaattagaaagtaagcgttttgttcctactgagttgggagaaatagttcatgaacaagtgaaagaatacttcccagagattattgatgtggaattcacagtgaatatggaaacgttacttgataagattgcagaaggcgacattacatggagaaaagtaatagacggtttctttagtagctttaaacaagatgttgaacgtgctgaagaagagatggaaaagattgaaatcaaagatgagccagccggtgaagactgtgaagtttgtggttctcctatggttataaaaatgggacgctatggtaagttcatggcttgctcaaacttcccggattgtcgtaatacaaaagcgatagttaagtctattggtgttaaatgtccaaaatgtaatgatggtgacgtcgtagaaagaaaatctaaaaagaatcgtgtcttttatggatgttcgaaatatcctgaatgcgactttatctcttgggataagccgattggaagagattgtccaaaatgtaaccaatatcttgttgaaaataaaaaaggcaagacaacacaagtaatatgttcaaattgcgattataaagaggcagcgcagaaataatatttttatttcctagagacattttaagattgttaaatagaatcattagtgaatcttattttaaagatagtaatggattaatctaaataagtgcggataatataaacataacaacataattaaaagacataaatgacaataaaaggagtatagaaatgactcaaactgtaaatgtaataggtgctggtcttgccggttcagaagcggcatatcaattagctgaaagaggaattaaagttaatctaatagagatgagacctgttaaacaaacaccagcgcaccatactgataaatttgcggaacttgtatgttccaattcattacgcggaaatgctttaactaatggtgtgggtgttttaaaagaagaaatgagaagattgaattctataattattgaagcggctgataaggcacgagttccagctggtggtgcattagcagttgatagacacgatttttcaggttatataactgaagtacttaaaaatcatgaaaatatcacaattattaatgaagaaattaatgccattccagatggatacacaattatcgcaacaggaccacttactacagaaacccttgcgcaagaaatagtggacattactggtaaagatcaactttatttctatgatgcggctgctccaattattgaaaaagaatctattgatatggataaagtttacttaaagtcccgttatgataaaggtgaagctgcatatttaaactgtcctatgactgaggatgaatttaatcgcttttatgatgcagtattagaagctgaagttgcgcctgtaaattcatttgaaaaagaaaaatatttcgagggttgtatgccttttgaagtaatggcagaacgcggacgcaagacattactatttggaccaatgaaaccagtaggattagaagatccaaagactgggaaacgtccttatgcggtggttcaattaagacaagatgacgctgctggtacactctacaatattgttggcttccaaacgcatttaaaatggggagctcaaaaagaagtcattaaattaattccaggcttagaaaatgttgatattgttagatatggtgtgatgcatagaaataccttcattaattcaccggacgtattaaacgagaaatatgaattgatttcacaaccaaacatacagtttgcgggacaaatgactggtgttgaaggttatgtagaaagcgcagctagcggcttagttgcaggtatcaatcttgcgcataaaatattaggcaagggtgaggtagtatttccgagagaaacaatgattggaagtatggcttactatatttctcatgctaaaaacaataagaatttccaacctatgaatgctaacttcgggttattaccatctttagaaactagaattaaagataaaaaagaacgctatgaagcacaagctactagagctttggattacttagaaaatttcaaaaaaactttataaaatagttagaaagactagatatgctattcattcttaagtcatcaacgagtaagtaatgactttctaaatggaaaatacttatcctagtctttttaattttggaattgttacgtatttctgacaatttagaattcgcattcaaaaaatatctaaataaataacacgcaataagttgattgatgtaacatgtaagagaatgttttaaataaactttatttaaaaggcaatgaaataataaatggcaaggctattaataaagacttttagtaattaatttaaaaaagaggtattctaattaacaggttttccgattagttacaattatttaattctcaaaagatttagaattgattatcaaattactgtaagccctttgctgtatatgctacaattcttattgatggagggtaaatgtattgaatcatattcaagatgcgtttttaaatacattgaaagttgaacggaatttttcggaacacacattgaaatcatatcaagatgacttaattcagtttaatcaatttttagaacaagaacatttagagttgaatacttttgaatacagagatgctagaaattatttgagctatttatattcaaatcatttgaaaagaacatctgtttctcgtaaaatctcaacgttaagaactttctatgaatattggatgacgcttgatgagaacattattaatccatttgttcaattagtacatccgaaaaaagaaaaatatcttccgcaattcttttacgaagaagaaatggaagcgttattcaaaactgtagaagaggacacttcaaaaaatttacgggatcgagttattcttgaattgttgtatgctacaggcatccgtgtttcggaattagtaaatattaaaaaacaagatatagatttttacgcgaatggtgttaccgtattaggaaaagggagcaaagagcgttttgtaccgtttggtgcttattgtagacaaagcatcgaaaattatttagaacatttcaaaccaattcagtcatgcaatcatgattttcttattgtaaatatgaagggtgaagcaatcactgaacgcggtgtacgatatgttttaaatgatattgttaaacgaacagcaggcgtaagtgagattcatccccacaagctcagacatacatttgcaacgcatttattgaatcaaggtgcagacctaagaacagtacaatcgttattaggtcatgttaatttgtcaacaactggtaaatatacacacgtatctaaccaacaattaagaaaagtgtatctaaatgcacatcctcgagcgaaaaaggagaatgaaacatgagtaatacaacattacatgcaacaacaatttatgctgtaagacataatgggaaagcagctatggctggagatgggcaagtaacgcttggtcaacaagtcatcatgaaacaaacggcaagaaaagtgcgacgtttatatgaaggtaaagtgttagctggtttcgcaggtagtgtagcagatgcgtttacgttatttgaaaaattcgaaacaaaattacaacagtttagtggtaacttagaaagagctgctgttgaattggcacaagaatggcgaggcgataaacaattacgtcaattagaagctatgctaattgtaatggataaagatgctattttagttgtcagtggaactggcgaagttattgccccagatgatgaccttatcgctattggatcaggaggcaactacgcattaagcgcaggacgtgcattgaaacgccatgcatcgcatttgtctgctgaagaaatggcatatgagagcttgaaagtagcggctgatatttgtgtctttaccaacgataatattgttgttgaaacactataataatcagagcacgataaataattacgagcaattaattttagttaaaagacggaggaatgaaattaatggatacagctggaataagattaactccaaaagaaatcgtatctaaattaaatgaatacatcgttggacaaaatgatgctaaacgtaaagtggcaattgccttacgtaatcgatacagaagaagtttattagatgaggaatcaaagcaagaaatttcacctaaaaatattttgatgattggaccaactggcgttggtaaaactgaaattgcaagaagaatggccaaagttgtcggcgcgccatttataaaagtagaagctactaaatttactgaggtaggttatgtaggacgagatgttgaaagtatggttagagatcttgttgatgtttcagtaagattagtcaaggcacagaaaaaatcattggtacaagacgaagcaacagctaaggccaatgaaaaacttgttaagttattagttccaagtatgaaaaagaaagcgtctcaaacgaataatcctttagagtcacttttcggaggtgcaattccaaatttcggacaaaataacgaagatgaagaagaaccacctactgaggaaattaaaacaaaacgttctgaaattaagagacagctagaagaaggcaaacttgaaaaagaaaaggtaagaattaaagtcgaacaagatcctggtgctttaggtatgctaggtacaaatcaaaatcagcaaatgcaagagatgatgaatcaattaatgcctaaaaagaaagttgagcgagaagttgctgttgagacggcaaggaaaatcttagctgatagttatgcggatgaactaattgatcaagaaagcgctaaccaagaagcgcttgaattagcagaacaaatgggtatcatctttatagatgaaatcgacaaagttgcgacgaataatcataatagtggtcaagatgtctcaagacaaggtgttcaaagagatattttacctatacttgaaggtagcgttattcaaaccaaatatggtactgtgaatactgaacatatgctgtttataggtgctggagctttccatgtatctaagccgagtgacttgataccagaattgcaaggtcgttttccgattagagttgaacttgatagtttatcggtagaagattttgtaagaattttgacagaaccaaaattgtcattaattaaacaatatgaagcattgcttcaaacagaagaagttactgtaaactttaccgatgaagcaattactcgcttagctgagattgcctatcaagtaaatcaagatacagacaacattggtgcacgtcgacttcatacaattttagaaaagatgctagaagatttatcattcgaagcaccaagtatgccgaatgcagttgtagatattaccccacaatatgttgatgataaattaaaatcaatttcaacaaataaagatttaagtgcatttattctataaaaatatacaaaaggagaaaaattcatgagcttattatctaaaacgagagagttaaacacgttacttcaaaaacacaaaggtattgcggttgattttaaagatgtagcacaaacgattagtagcgtaactgtaacaaatgtatttattgtatcgcgtcgaggtaaaattttagggtcgagtctaaatgaattattaaaaagtcaaagaattattcaaatgttggaagaaagacatattccaagtgaatatacagaacgattaatggaagttaaacaaacagaatcaaatattgatatcgataatgtattaacagtattcccacctgaaaacagagaattattcatagatagtcgtacaactatcttcccaattttaggtggaggagaaagattaggtacattagtacttggtcgagtacatgatgattttaatgaaaatgatttggtactaggtgaatatgctgctacagttattggtatggaaatcttacgtgagaagcatagtgaagtagaaaaagaagcgcgcgataaagctgctattacaatggcaattaattcattatcttattctgaaaaagaagcaattgaacatatctttgaagaactaggcggtacggaaggtctattaatcgcatcaaaagttgcagatagagttggtattactagatctgtaattgtaaatgcactacgtaaattagaaagtgctggtgtaattgaatcacgttctttaggaatgaaaggtactttcattaaagttaaaaaagaaaaattcttagatgaattagaaaaaagtaaataagtcgatgagtctgggacataattcaatgtcctagtcgtgacgatgttatcttggcggtagtcaacgaaatgactttgatgattatgttgaagtcatttctttatttttgtctaattttcaatcaaattgatattccacattaacttgatagaattacctttaaatttatgaaaaaatacttgaaaaacatttgctttagacacggcattatgttatatttattttcggctataaagccaatacacacatatcaaacgtgattgtgtaaagggtgcaatatttatatattgtctttacaatagtttgctatggaggtaattaaccaataggaggaatttataatggcagtaatttcaatgaaacaattactagaagcgggtgttcacttcggtcaccaaacacgtcgttggaacccaaaaatgaaaaaatatatcttcactgagagaaatggtatttatatcatcgacttacaaaaaacagtgaaaaaagtagacgaggcatacaacttcttgaaacaagtttcagaagatggtggacaagtcttattcgtaggaactaaaaaacaagcacaagaatcagttaaatctgaagcagaacgtgctggtcaattctacattaaccaaagatggttaggtggattattaactaactataaaacgatctcaaaacgaatcaaacgtatttctgaaattgaaaaaatggaagaagatggtttattcgaagtattacctaaaaaagaagtagtagaacttaaaaaagaatacgaccgtttaatcaaattcttaggcggaattcgtgatatgaaatcaatgcctcaagcattattcgtagttgacccacgtaaagagcgtaatgcaattgctgaagctcgtaaattaaatattcctatcgtaggtatcgttgacactaactgtgatcctgacgaaattgactacgttatcccagcaaacgacgatgctatccgtgcggttaaattattaactgctaaaatggcagatgcaatcttagaaggtcaacaaggcgtttctaatgaagaagtagctgcagaacaaaacatcgatttagatgaaaaagaaaaatcagaagaaacagaagcaactgaagaataatcaactgttgaatctgacttagatatagtttaaatgggtgataagatattaatgcttatcaccttttttaaaaagaaaatcgaggcaaattacaaatattcaattagagtattggcaatcttgcctataataatgctaaaatcataatatataaaatgataacttattggaggaataatgaatggcaactatttcagcaaaacttgttaaagaattacgtgaaaaaactggcgcgggtatgatggattgtaaaaaagcgctaactgaaactgatggtgacatcgataaagcgattgactacctacgtgaaaaaggtattgctaaagcagctaaaaaagcagaccgtattgcggctgaaggtttagtacatgtagaaactaaaggtaacgacgcagttatcgttgaaatcaactctgaaacagactttgttgctcgtaacgaaggtttccaagagttagttaaagaaatcgctaatcaagtattagatacaaaagctgaaactgttgaagctttaatggaaacaactttaccaaatggtaaatcagttgatgaaagaattaaagaagcaatttcaacaatcggtgaaaaattaagtgttcgtcgttttgctatcagaactaaaactgataacgatgctttcggcgcttacttacacatgggtggacgcattggtgtattaacagttgttgaaggttcaactgacgaagaagcagcaagagacgttgctatgcatatcgctgcaatcaaccctaaatatgtttcttctgaacaagttagcgaagaagaaatcaaccacgaaagagaagttttaaaacaacaagcattaaatgaaggtaaaccagaaaacatcgttgaaaaaatggtggaaggacgtttacgtaaatacttacaagaaatttgtgctgtagatcaagacttcgttaaaaaccctgatgtaacagttgaagctttcttaaaaacaaaaggtggaaaacttgttgacttcgtacgctatgaagtaggcgaaggtatggaaaaacgcgaagaaaactttgcggatgaagttaaaggacaaatgaaataatctgtcataaagtaaaacaaggaagaagacacctttaatgttgctttattaaaatgtaaatcattctaataaaacgacaactgtgtcttctttacttgtatatgttacatatattcacgatagagaggataagaaaatggctcaaatttctaaatataaacgtgtagttttgaaactaagtggtgaagcgttagctggagaaaaaggatttggcataaatccagtaattattaaaagtgttgctgagcaagtggctgaagttgctaaaatggactgtgaaatcgcagtaatcgttggtggcggaaacatttggagaggtaaaacaggtagtgacttaggtatggaccgtggaactgctgattacatgggtatgcttgcaactgtaatgaatgccttagcattacaagatagtttagaacaattggattgtgatacacgagtattaacatctattgaaatgaagcaagtggctgaaccttatattcgtcgtcgtgcaattagacacttagaaaagaaacgcgtagttatttttgctgcaggtattggaaacccatacttctctacagatactacagcggcattacgtgctgcagaagttgaagcagatgttattttaatgggcaaaaataatgtagatggtgtatattctgcagatcctaaagtaaacaaagatgcggtaaaatatgaacatttaacgcatattcaaatgcttcaagaaggtttacaagtaatggattcaacagcatcctcattctgtatggataataacattccgttaactgttttctctattatggaagaaggaaatattaaacgtgctgttatgggtgaaaagataggtacgttaattacaaaataaatttagaggtgtaaaataatgagtgacattattaatgaaactaaatcaagaatgcaaaaatcaatcgaaagcttatcacgtgaattagctaacatcagtgcaggaagagctaattcaaatttattaaacggcgtaacagttgattactatggtgcaccaacacctgtacaacaattagcaagcatcaatgttccagaagcacgtttacttgttatttctccatacgacaaaacttctgtagctgacatcgaaaaagcgataatagcagctaacttaggtgttaacccaacaagtgatggtgaagtgatacgtattgctgtacctgccttaacagaagaacgtagaaaagagcgcgttaaagatgttaagaaaattggtgaagaagctaaagtatctgttcgaaatattcgtcgtgatatgaatgatcagttgaaaaaagatgaaaaaaatggcgacattactgaagatgagttgagaagtggtactgaagatgttcagaaagcaacagacaattcaataaaagaaattgatcaaatgattgctgataaagaaaaagatattatgtcagtataaaactaatatacaatgacatattaaaatgccagtattaaacgataatgtaacatttaaaatgggcatgtttaattaaatcaaagatgcatgtgataatttaaattcacaatgagcataaaaatggtgtttaaacaagttaattaaacatatactttataaataataggcattaggtatattgctataataaagttatgtaatttttaacctcagtatgtatgtcacatttctggtgtaaactgtaccgagtcagactttggtacagtttttttatttgcttattcaatgcattaaatgagtatgataaaatgataatgattgtttagtaacttatactatatgacagagatgatcaggctcggaggaaagaccatgtttaaaaagctaataaataaaaagaacactataaataattataatgaagaattagactcgtctaatatacctgaacatatcgctattattatggatggtaatgggcgatgggctaagaagcgaaaaatgcctagaattaaaggccattacgaaggtatgcaaacaataaaaaaaattactaggatagctagtgatattggtgttaagtacttaactttatatgccttttccactgaaaattggtcaagacctgaaagtgaagtaaattatattatgaatttgcctgtcaatttcttaaagacattcttaccggaactaattgaaaaaaatgtcaaagttgaaacaattggatttactgataagttgccaaaatcaacgatagaagcaattaataatgctaaagaaaagacagctaataataccggcttaaaattaatatttgcaattaattatggtggcagagcagaacttgttcatagtattaaaaatatgtttgacgagcttcatcaacaaggtttaaatagtgatatcatagatgaaacatatataaacaatcatttaatgacaaaagactatcctgatccagagttgttaattcgtacttcaggagaacaaagaataagtaatttcttgatttggcaagtttcgtatagtgaatttatctttaatcaaaaattatggcctgactttgacgaagatgaattaattaaatgtataaaaatttatcagtcacgtcaaagacgctttggcggattgagtgaggagtagtatagtatgagagttagaacgctgacagctattattgccttaatcgtattcttgcctatcttgttaaaaggcggccttgtgttaatgatatttgctaatatattagcattgattgcattaaaagaattgttgaatatgaatatgattaaatttgtttcagttcctggtttaattagtgcagttggtcttatcatcattatgttgccacagcatgcagggccatgggtacaagtaattcaattaaaaagtttaattgcaatgagctttattgtattaagttatactgtcttatctaaaaacagatttagttttatggatgctgcattttgcttaatgtctgtggcttatgtaggcattggttttatgttcttttatgaaacgagatcagaaggattacattacatattatatgcctttttaattgtttggcttacagatacaggggcttacttgtttggtaaaatgatgggtaaacataagctttggccagtaataagtccgaataaaacaatcgaaggattcataggtggcttgttctgtagtttgatagtaccacttgcaatgttatattttgtagatttcaatatgaatgtatggatattacttggagtgacattgattttaagtttatttggtcaattaggtgatttagtggaatcaggatttaagcgtcatttcggcgttaaagactcaggtcgtatactacctggacacggtggtattttagaccgatttgacagctttatgtttgtgttaccattattaaatattttattaatacaatcttaatgctgagaacaaatcaataaacgtaaagaggagttgctgagataatttaatgaatctcagaactccttttgaaaattatacgcaatattaactttgaaaattagacgttatattttgtgatttgtcagtatcatattataatgacttatgttacgtatacagcaatcaattttaaaataaaagaaatttataaacaatcgaggtgtagcgagtgagctatttagttacaataattgcatttattattgtttttggtgtactagtaactgttcatgaatatggccatatgttttttgcgaaaagagcaggcattatgtgtccagaatttgcgatcggtatggggccaaaaatttttagttttagaaaaaatgaaacactttacactattaggttattgcctgttggtggatatgttcgtatggcaggagatggcttagaagagccaccagtcgagcccggtatgaacgttaaaattaaactgaatgaagaaaatgaaataacacatatcatattagatgatcatcataagtttcaacaaattgaagcgatcgaagttaaaaaatgtgattttaaggatgacttattcatagaaggtatcactgcttatgataatgaaagacatcattttaaaattgctagaaagtctttctttgttgaaaatggtagcttagttcaaattgctccgagagacagacaatttgcacataaaaagccatggccgaaatttttaacattatttgcgggaccgttatttaactttatattagctttagtcctatttattggtcttgcatattatcaaggtacacctacgtctactgtagaacaagtcgcagataagtatccagctcaacaagcaggattacaaaaaggtgataaaattgttcaaattggcaaatataaaatatctgaatttgatgatgttgataaggcgttagataaagttaaagataataagacgactgttaaatttgaacgtgatggtaaaacgaagtcagttgaattaacacctaaaaagactgaaagaaaactgactaaagtaagttcagagacgaagtatgttctcggattccaaccagcgagtgaacatacactttttaaaccaattgtattcggatttaaaagctttttaatcggtagtacttatatttttacagctgtagtaggtatgttggctagtatatttacgggcggattctcatttgatatgttaaatggtccggttggtatttatcataacgtcgactcagttgttaaagcgggtatcattagcttaattggttacactgcgttattaagtgtaaacttaggtattatgaatttaattcctattcctgcactagacggtggtcgtattttatttgttatatatgaagcgattttcagaaaaccagttaataaaaaagcggaaacaacgattattgctattggtgccattttcatggtcgttattatgatattagtaacgtggaatgatattcgacgatatttcttataatttaggaggataaataattatgaagcaatccaaagtttttataccaacgatgcgtgacgtgccatcagaagcagaagcacaaagtcatcgtttattattgaaatcgggtttgataaaacaaagtacaagtgggatttatagttatttaccgctagcaacacgtgtgttaaataatattactgcaattgtgcgacaagaaatggaacgtatcgattctgttgaaattttaatgccagcgttacaacaagctgaattatgggaagaatcaggacgttggggtgcatatggcccagaattaatgcgtttacaagatagacatggaagacaatttgcattaggtccaacacatgaagaattagttacatcaatagtaagaaatgaattgaaatcatacaaacaattaccgatgacattattccaaattcaatctaaattccgtgatgaaaagagaccacgttttggtttacttcgtgggcgtgaatttattatgaaagatgcgtattcattccatgctgacgaggcatcattagatcaaacgtatcaagatatgtatcaagcgtatagccgtatttttgagagagttggcattaatgctagaccagttgtagcagattcaggtgctataggcggtagccatacacatgaatttatggcattaagtgctatcggtgaggatacaatcgtttacagtaaagaaagtgactatgctgctaatatcgaaaaagcagaagtcgtttacgaaccaaatcataagcattctactgtgcaacctttagaaaaaattgaaacaccaaatgttaagactgcgcaagaattggcagacttcttaggtagaccagtagatgaaatcgttaaaacgatgattttcaaagttgatggcgaatatattatggttttagtgcgtggccatcatgaaattaatgacattaaattaaaatcttatttcggcacagataatattgaattagcaacacaagacgaaattgttaatttagttggtgcaaatccgggttcactaggtcctgttattgataaagaaatcaaaatttatgcagataattttgtgcaagatttaaataatttagttgtcggtgctaacgaagatggctatcacttaattaatgtaaatgtaggcagagacttcaacgttgatgaatatggcgatttccgttttattttagaaggcgagaagttaagtgatggttcaggcgttgcacattttgctgaaggtattgaagttggtcaagtattcaaattgggtactaagtattcagaatcaatgaatgctacattcttagataaccaaggaaaagctcaacctttaattatgggttgttacggaattggaatttctagaacgctaagtgcgattgttgaacaaaatcacgatgataatggaattgtttggcctaaatcagttactccgtttgatttacatttaatttctattaatcctaagaaagatgatcaacgagaactagcagatgcactatatgctgaatttaatactaaatttgatgtgttgtacgatgatcgtcaggaacgtgcaggtgtcaaatttaatgatgccgatttaattggtttaccactgcgaattgttgttggtaaacgtgcatcggaaggtattgtagaagttaaagaacgtctaacaggtgatagcgaagaagtccacattgatgacttaatgactgtcattacaaataaatatgataacttaaaataattaagatcgaatgaattataagagtaggaaaaagctgaaagaaatcagatgcttatgtcctgctcttattatttttgatataatgattattcgatgaaaaatgactgaagacatagtataattaaagataaatttgttttaacaatattatgattagccaaatataaagcatttaattttctatcgttactatgcctacataatctaaatattgttcgaacacgtaaaagtaatttctatttaaggtggtaattgtcttggcaatgacagagcaacaaaaatttaaagtgcttgctgatcaaattaaaatttcaaatcaattagatgctgaaattttaaattcaggtgaactgacacgtatagatgtttctaacaaaaacagaacatgggaatttcatattacattaccacaattcttagctcatgaagattatttattatttataaatgcaatagagcaagagtttaaagatatcgccaacgttacatgtcgttttacggtaacaaatggcacgaatcaagatgaacatgcaattaaatactttgggcactgtattgaccaaacagctttatctccaaaagttaaaggtcaattgaaacagaaaaagcttattatgtctggaaaagtattaaaagtaatggtatcaaatgacattgaacgaaatcattttgataaggcatgtaatggaagtcttatcaaagcgtttagaaattgtggttttgatatcgataaaatcatcttcgaaacaaatgataatgatcaagaacaaaacttagcttctttagaagcacatattcaagaagaagacgaacaaagtgcacgattggcaacagagaaacttgaaaaaatgaaggctgaaaaagcgaaacaacaagataacaacgaaagtgctgtcgataagtgtcaaattggtaagccgattcaaattgaaaatattaaaccaattgaatctattattgaggaagagtttaaagttgcaatagagggtgtcatttttgatataaacttaaaagaacttaaaagtggtcgccatatcgtagaaattaaagtgactgactatacggactctttagttttaaaaatgtttactcgtaaaaacaaagatgatttagaacattttaaagcgctaagtgtaggtaaatgggttagggctcaaggtcgtattgaagaagatacatttattagagatttagttatgatgatgtctgatattgaagagattaaaaaagcgacaaaaaaagataaggctgaagaaaagcgtgtagaattccacttgcatactgcaatgagccaaatggatggtatacccaatattggtgcgtatgttaaacaggcagcagactggggacatccagccattgcggttacagaccataatgttgtgcaagcatttccagatgctcacgcagcagcggaaaaacatggcattaaaatgatatacggtatggaaggtatgttagttgatgatggtgttccgattgcatacaaaccacaagatgtcgtattaaaagatgctacttatgttgtgttcgacgttgagacaactggtttgtcaaatcagtatgataaaatcatcgagcttgcagctgtgaaagttcataacggtgaaatcatcgataagtttgaaaggtttagtaatccgcatgaacgattatcggaaacgattatcaatttgacgcatattactgatgatatgttagtagatgcccctgagattgaagaagtacttacagagtttaaagaatgggttggcgatgcaatattcgtagcgcataatgcttcgtttgatatgggctttatcgatacgggatatgaacgtcttgggtttggaccatcaacgaatggtgttatcgatactttagaattatctcgtacgattaatactgaatatggtaaacatggtttgaatttcttagctaaaaaatatggcgtagaattaacgcaacatcaccgtgccatttatgatacagaagcaacagcttacattttcataaaaatggttcaacaaatgaaagaattaggcgtattaaatcataacgaaatcaacaaaaaactcagtaatgaagatgcatataaacgtgcaagacctagtcatgtcacattaattgtacaaaaccaacaaggtcttaaaaatctatttaaaattgtaagtgcatcattggtgaagtatttctaccgtacacctcgaattccacgttcattgttagatgaatatcgtgagggattattggtaggtacagcgtgtgatgaaggtgaattatttacggcagttatgcagaaggaccagagccaagttgaaaaaattgccaaattttatgattttattgaaattcaaccaccggcactttatcaagatttaattgatagagagcttattagagatactgaaacattacatgaaatttatcaacgtttaatacatgcaggtgacacagcgggtatacctgttattgcgacaggaaatgcacactatttgtttgaacatgatggtatcgcacgtaaaattttaatagcatcacaacccggcaatccacttaatcgctcaactttaccggaagcacattttagaactacagatgaaatgttaaacgagtttcattttttaggtgaagaaaaagcgcatgaaattgttgtgaaaaatacaaacgaattagcagatcgaattgaacgtgttgttcctattaaagatgaattatacacaccgcgtatggaaggtgctaacgaagaaattagagaactaagttatgcaaatgcgcgtaaactgtatggtgaagacctgcctcaaatcgtaattgatcgattagaaaaagaattaaaaagtattatcggtaatggatttgcggtaatttacttaatttcgcaacgtttagttaaaaaatcattagatgatggatacttagttggttcccgtggttcagtaggttctagttttgtagcgacaatgactgagattactgaagtaaacccgttaccgccacactatatttgtccgaactgtaaaacgagtgaatttttcaatgatggttcagtagggtcaggattcgatttacctgataagacgtgtgaaacttgtggagcgccacttattaaagaaggacaagatattccgtttgaaacatttttaggatttaaaggagataaagttcctgatatcgacttaaactttagtggtgaatatcaaccgaatgcccataactacacaaaagtattatttggtgaggataaagtattccgtgcaggtacaattggtaccgttgctgaaaagactgcttttggttatgttaaaggttatttgaatgatcaaggcatccacaaaagaggcgctgaaatagatcgactcgttaaaggatgtacaggtgttaaacgtacaactggacagcatccaggaggtattattgtagtacctgattacatggatatttatgattttacgccgatacaatatcctgccgatgatcaaaattcagcatggatgacgacacattttgatttccattctattcatgataatgtattaaaacttgatatacttggacacgatgatccaacaatgattcgtatgcttcaagatttatcagggattgatccaaaaacaatacctgtagatgataaagaagttatgcagatatttagtacacctgaaagtttgggtgttactgaagatgaaattttatgtaaaacaggtacgtttggggttccagaattcggtacagggttcgtgcgtcaaatgttagaagatacaaagccaacaacattttctgaattagttcaaatctcaggattatctcatggtacagatgtgtggttaggcaatgctcaagaattaattaaaagcggtatatgtgatttatcaagtgtaattggttgtcgtgatgatatcatggtttatttaatgtatgctggtttagaaccatcaatggcttttaaaataatggagtcagtacgtaaaggtaaaggtttaactgaagaaatgattgaaacgatgaaagaaaatgaagtgccggattggtatttagattcatgtcttaaaattaagtacatgttccctaaagcccatgcagcagcatacgttttaatggcagtacgtatcgcatatttcaaagtacatcatccactttattactatgcatcttactttacaattcgtgcgtcagactttgatttaatcacgatgattaaagataaaacaagcattcgaaatactgtaaaagacatgtattctcgctatatggatctaggtaaaaaagaaaaagacgtattaacagtcttggaaattatgaatgaaatggcgcatcgaggttatcgaatgcaaccgattagtttagaaaagagtcaggcgttcgaatttatcattgaaggcgatacacttattccgccgttcatatcagtgcctgggcttggcgaaaacgttgcgaaacgaattgttgaagctcgtgacgatggcccatttttatcaaaagaagatttaaacaaaaaagctggattatctcagaaaattattgagtatttagatgagttaggctcattaccgaatttaccagataaagctcaactttcgatatttgatatgtaaaatgaaataatcaaggtatttatttaatgcgtatggcgtagttaaagaaatacaaaattgttgctggacataaaattatgcctgtatttcttttcaacgtcttacgagtctattcgaatgtaatggtgaaataaatgaacaaacttttacaagaatctctgattaatagtgaagtcatttgtttcaagcataaacttatgctataattaagttgcttaaaaattagtgaactcaggcagaagagtgggagattcccgctcttttctatttgccaaaaagggaggcctgtatgagtaaaattacagaacaagtagaagtgattgttcaaccaattatggaagacttgaattttgaacttgtagacgttgaatatgtcaaagagggtagagatcattttcttagaatctctattgataaagaaggtggcgtagatttaaatgattgtacgctagcttctgaaaaaataagtgaagctatggatgcaaatgatcctattcctgaaatgtattatttagacgtagcgtcacctggtgcagaacgtccaattaaaaaagaacaagatttccaaaatgcaataactaaacctgtatttgtttctttatatgtaccaattgaaggtgaaaaggaatggttaggcattttacaagaagtcaataatgaaacaattgtagtacaagttaaaatcaaagcaagaacgaaagatatagagataccgagagacaaaatagcaaaagcacgtcacgcagttatgatttaacgtgatgaggaggaaaaaacgtgtcaagtaatgaattattattagctactgagtatttagaaaaagaaaagaagattcctagagcagtattaattgatgctattgaagcagctttaattactgcatacaaaaagaattatgatagtgcaagaaatgtccgtgtggaattaaatatggatcaaggtactttcaaagttatcgctcgtaaagatgttgttgaagaagtatttgacgacagagatgaagtggatttaagtacagcgcttgttaaaaaccctgcatatgaaattggtgatatatacgaagaagatgtaacacctaaagattttggtcgtgtaggtgctcaagcagcgaaacaagcagtaatgcaacgtcttcgtgatgctgaacgtgaaattttatttgaagaatttatagacaaagaagaagacatacttactggaattattgaccgtgttgaccatcgttatgtatatgtgaatttaggtcgtatcgaagctgttttatctgaagcagaaagaagtcctaacgaaaaatatattcctaacgaacgtatcaaagtatatgttaacaaagtggaacaaacgacaaaaggtcctcaaatctatgtttctcgtagccatccaggtttattaaaacgtttatttgaacaagaagttccagaaatttacgatggtactgtaattgttaaatcagtagcacgtgaagctggcgatcgctctaaaattagtgtcttctctgaaaacaatgatatagatgctgttggtgcatgtgttggtgctaaaggcgcacgtgttgaagctgttgttgaagagctaggtggcgaaaaaatcgacatcgttcaatggaatgaagatccaaaagtatttgtaaaaaatgctttaagcccttctcaagttttagaagttattgttgatgaaacaaatcaatctacagtagttgttgttcctgattatcaattgtcattagcgattggtaaaagaggacaaaacgcacgtctagctgctaaattaaccggctggaaaattgatattaaatcagaaacagatgcgcgtgaagcgggtatctatccagtagttgaagcagaaaaagtaactgaagaagatattgctttagaagatgctgacacaacagaatcaaccgaagaggtaaatgatgtttcagttgaaacaaatgtagagaaagaatctgaataataggttggagtgaagtatctatgaaaaagaaaaaaattccgatgcgaaaatgtattctttcaaatgaaatgcatcccaaaaaagatatgattcgtgttgttgttaataaagaaggcgaaatctttgcggatgttactggaaagaaacaaggccgtggcgcatatgtttctaaagatgttgctatggttgaaaaagcacaacaaaaagaaattttagaaaaatattttaaagcatctaaagagcaattggatcctgtttacaaagaaattattagattaatttatagagaagagatcccaaaatgagtatagatcaaatattaaactttttaggattagcaatgagagctggtaaagtaaaaacaggtgaatcagtcattgttaatgagattaaaaaaggaaatttgaagctcgttattgttgcaaatgatgcgtctgataatacagctaaattaattacagataaatgtaagagttacaaagttccattcagaaagtttggaaatcgaaatgaattgggaatagcacttggaaaaggtgagcgtgttaatgtagggattactgacccaggctttgctaaaaagttgctatcaatgatagatgaatatcataaggagtgattatatgagtaaacaaagaatttacgaatatgcgaaagaattaaatctaaagagtaaagagattatagatgagttaaaaagcatgaatattgaggtttcaaatcatatgcaagctttggaagatgaccaaattaaagcattagataaaaagttcaaaaaagaacaaaagaacgacaataaacaaagcactcaaaataatcaccaaaaatcaaacaatcaaaaccaaaataaagggcaacaaaaagataacaaaaagaatcaacaacaaaataataaaggcaacaaaggcaataaaaagaataatagaaataataagaaaaataacaagaataataaaccacaaaatcaaccagctgctccaaaagaaataccatcaaaagtgacatatcaagaaggtattacagtaggcgaatttgcggataaattaaatgttgaatcatcagaaattatcaaaaaattattcttacttggtattgttgctaatatcaatcaatcattaaatcaagaaacaatcgaattaattgccgatgattatggcgttgaggttgaagaggaagttgtgattaatgaagaagatttatcaatctacttcgaagacgaaaaagatgatccagaagcaattgagagaccagcagttgtaacaattatgggacatgttgaccatggtaaaacgactttattagattcaattcgtcatacaaaagttacagcaggtgaagcaggcggaatcactcaacatattggtgcatatcaaattgaaaacgatggcaaaaaaatcactttcttagatacaccgggacatgctgcatttacaacgatgcgtgcgcgtggtgcacaagtaacagatattacaattttagtagttgcagctgacgatggtgttatgccacaaacaattgaagcaattaaccatgctaaagaagcagaagtaccaattattgttgcagtaaataaaattgataaaccaacttcaaatcctgatcgagttatgcaagaattaactgaatatggtttaattcctgaagattggggcggcgaaacaattttcgttccactttctgcattaagtggtgatggtatcgacgatttattagaaatgataggattagttgcagaagttcaagaacttaaagcaaatcctaaaaaccgtgctgtcggtacagttatcgaagctgaattagataaatcacgtggtccttctgcatcattattagtacaaaatggtacattaaatgttggtgatgcgattgtagttggtaatacttacggccgtatccgtgcaatggttaatgacttaggtcaaagaatcaaaacagctggtccatcaacgcctgttgaaattacaggtattaatgatgtgccacaagctggggatcgctttgttgtatttagtgatgaaaaacaagctcgtcgtattggtgaatcaagacacgaagctagcattgtacaacaacgtcaagaaagtaaaaatgtttcattagataacctgtttgaacaaatgaaacaaggtgaaatgaaagatttaaacgttattattaaaggtgatgttcaaggttctgttgaagctttagctgcatcattaatgaaaattgatgttgaaggcgtaaatgttcgtatcattcatacagcggttggtgcaattaatgagtcagacgtgacacttgctaatgcctcaaatggtattatcattggtttcaatgttcgtccagacagtggtgcaaaacgtgctgcagaagctgaaaatgttgatatgcgtttacacagagttatttataatgttatcgaagaaattgaatcagcgatgaaaggtttacttgatccagaatttgaagaacaagttatcggacaagctgaagttcgtcaaacattcaaagtttctaaagttggtactattgctggatgttatgttactgaaggtaaaattacgcgaaatgctggtgtacgtattattcgtgatggtattgttcaatatgaaggcgaattagatacacttaaacgtttcaaagatgatgctaaggaagttgcaaaaggttatgaatgtggtattacaattgaaaactacaatgaccttaaagaaggcgatgttatcgaagcatttgaaatggttgaaattaagcgttaattaaataaattacaagctaaaagtatagttaagattgatatgctccctataaatattgcactttttaagtgtctactttatagggagcatatttgatactagcttttggttttttattagaatagattacctattaaaagttacgttatatggacatgattttgtataaaattttgtggtggcctagaatgatttttaatgacaaaatataatgtcgactattattggaaaattttctgttgaaatgcctatcttacggcaaactttatttgattttataggcttaatttattaaaataacgtgtgagctaaaataattgtttaagcattgttacactaaaaaatgcaaataacaattgaacttaaagataaagaggtgacaagaatgagcagtatgagagcagagcgtgttggtgaacaaatgaagaaggaattaatggatatcatcaacaataaagtcaaagatcctcgagttggttttattacaattacagatgttgttttaacaaatgatttatcgcaggctaaagtatttttaactgtattaggtaacgataaagaagtagaaaatacatttaaagcacttgataaagcaaaaggcttcattaagtctgaattaggttctagaatgcgattacgtattatgccggaattaatgtatgaatatgatcaatcaatcgaatatggtaataaaattgaacgaatgattcaagatttacacaaacaagatagataatttagtgttaggtatctggaaaatgtttgataatttcttaatatcggtatattaacattaaacagttaatacatagatgtgtagaaatagttaacattttccagtttttttatgaataaattcagttgatacgctattaaaatatattttaaaaaaagaaggtgactatatgtataatgggatattaccagtatataaagagcgcggtttaacaagtcatgacgttgtattcaaattgcgtaaaatattaaaaactaaaaaaataggtcacacgggtacgcttgatcccgaagttgcaggcgtgttaccggtatgtataggtaatgcaacgagagttagtgattatgttatggatatgggcaaagcttatgaagcaactgtatcgataggaagaagtacaacgactgaagatcaaacgggtgatacattggaaacaaaaggtgtacactcagcagattttaataaggatgatattgaccgattgttagaaagttttaaaggtatcattgaacaaattccgccgatgtactcatccgtcaaagtaaatggtaaaaaattatatgaatatgcgcgtaataatgaaacagttgaaagaccaaagcgtaaagttaatattatagacattgggcgtatatctgaattagattttaaagaaaatgagtgtcattttaaaatacgcgtcatctgtggtaaaggtacatatattagaacgctagcaactgatattggtgtgaaattaggctttccggcacatatgtcgaaattaacacgaatcgagtctggtggatttgtgttgaaagatagccttacattagaacaaataaaagaacttcatgagcaggattcattgcaaaataaattgtttcctttagaatatggattaaagggtttgccaagcattaaaattaaagattcgcacataaaaaaacgtattttaaatgggcagaaatttaataaaaatgaatttgataacaaaattaaagaccaaattgtatttattgatgatgattcagaaaaagtattagcaatttatatggtacaccctacaaaagaatcagaaattaaacctaaaaaagtctttaattaaaggagatagaatttatgaaagtcatagaagtgacacatcctatacaatcaaaacagtatattacagaggatgttgcaatggcattcggatttttcgatggcatgcataaaggtcatgacaaagtctttgatatattaaatgaaatagctgaggcacgcagtttaaaaaaagcggtgatgacatttgatccgcatccatctgtcgtgttgaatcctaaaagaaaacgaacaacgtatttaacgccactttcagataaaatcgaaaaaattagccaacatgatattgattattgtatagtggttaatttttcatctaggtttgctaatgtgagcgttgaagattttgttgaaaattatataattaaaaataatgtaaaagaagtcattgctggttttgattttacttttggtaaatttggaaaaggtaatatgactgttcttcaagaatatgatgcgtttaatacgacaattgtgagtaagcaagaaattgaaaatgaaaaaatttctacaacttctattcgtcaagatttaatcaatggtgagttgcaaaaagcgaatgatgctttaggctatatatattctattaaaggcactgtagtgcaaggtgaaaaaaggggaagaactattggcttcccaacagctaacattcaacctagtgatgattatttgttgcctcgtaaaggtgtttatgctgttagtattgaaatcggcactgaaaataaattatatcgaggggtagctaacataggtgtaaagccaacatttcatgatcctaacaaagcagaagttgtcatcgaagtgaatatctttgactttgaggataatatttatggtgaacgagtgaccgtgaattggcatcatttcttacgtcctgagattaaatttgatggtatcgacccattagttaaacaaatgaatgatgataaatcgcgtgctaaatatttattagcagttgattttggtgatgaagtagcttataatatctagagttgcgtatagttatataaacaatctataccacacctttttcttagtaggtcgaatctccaacgcctaactcggattaaggagtattcaaacattttaaggaggaaattgattatggcaatttcacaagaacgtaaaaacgaaatcattaaagaataccgtgtacacgaaactgatactggttcaccagaagtacaaatcgctgtacttactgcagaaatcaacgcagtaaacgaacacttacgtacacacaaaaaagaccaccattcacgtcgtggattattaaaaatggtaggtcgtcgtagacatttattaaactacttacgtagtaaagatattcaacgttaccgtgaattaattaaatcacttggtatccgtcgttaatcttaatataacgtctttgaggttggggcatatttatgttccaaccttaatttatattaaaaaagctttttacaaatattaacatttattatatgttaagctaatattgtgtgaataataaggttacaatgagataaagatgatataagtacacctagagtaataatcaagatattaaaaataaagtatgtttttttaaaaaatataacttatatttatactgataagggtgggacgataagtctattttgtaaataatagatggatatcccgctctctttttttccaattcaatattttataactaatattaaaatacgataataaatgatatgatataactattagattcaagagaggagatttataatgtctcaagaaaagaaagtttttaaaactgaatgggcaggaagatctttaacgattgaaacagggcaattagctaaacaagcaaatggcgctgtattggttcgttatggagatacagtcgtgttatcgacggcaactgcatcaaaagaacctcgtgatggagatttcttcccattaacagtgaactatgaagaaaaaatgtacgctgcgggtaaaattcctggtggatttaaaaagagagaaggacgtcctggtgacgatgcaacattaactgcgcgattaattgatagaccaattagacctttattccctaaaggatataagcatgatgttcaaattatgaacatggtattaagtgcagatcctgattgttcaccacaaatggctgcaatgattggttcatctatggcgcttagtgtgtcggatattccattccaagggccaatcgccggtgtaaatgtgggttatattgacggtaaatatatcattaacccaacagtagaagaaaaagaagtttctcgtttagaccttgaagtagctggtcataaagatgcagtaaacatggtagaggcaggcgctagtgagattactgaacaagaaatgttagaggcgattttctttggtcatgaagagattcaacgtttagttgatttccaacaacaaatcgtcgaccacattcaacctgttaaacaagaatttattccagcagagcgtgatgaagcgctagttgaacgtgtaaaatctttaaccgaagaaaaaggacttaaagaaacagttttaacatttgataaacaacaacgagatgaaaatcttgataacttaaaagaagaaatcgtcaatgaatttatcgatgaagaagatccagaaaatgaattacttattaaagaagtttatgcaattttaaatgaattagtgaaagaagaagttcgacgtttaattgcagatgaaaaaattagaccagacggccgtaaacctgatgaaatccgtccattagattctgaagttggtattttacctagaacgcatggttcaggtctatttacacgtggtcagactcaagcactttcagttttaacattaggtgctttaggcgattatcaattaattgatggtttaggacctgaagaagaaaaaagattcatgcatcattacaacttcccgaatttttcagtaggtgaaactggtccagtacgtgcgccaggtcgtcgtgaaattggacatggtgcgttaggtgaaagagcattaaaatatattattcctgatactgctgatttcccatatacaattcgtattgtaagtgaggtacttgaatcaaacggttcatcatctcaagcgtcaatttgtggatcaacattagcattaatggatgcgggcgtaccgattaaagcaccagttgctggtattgctatgggtcttgttacacgtgaagatagctatacgattttaactgatatccaaggtatggaagatgcattaggtgatatggactttaaagtcgctggtactaaagaaggtattacagcaattcaaatggatattaaaattgacggtttaacgcgtgaaattatcgaagaggctctagaacaagcgagacgtggtcgtttagaaataatgaatcatatgttacaaacaattgatcaaccacgtactgaattaagtgcttacgcgccaaaagttgtaactatgacaattaaaccagataagattagagatgttatcggacctggtggtaaaaaaattaacgaaattattgatgaaacaggcgttaaattagatattgaacaagatggtactatctttattggggccgttgatcaagctatgataaatcgtgctcgtgaaatcattgaggaaattacacgtgaagcggaagtaggtcaaacttatcaagccactgttaaacgtattgaaaaatacggtgcgtttgtaggcctattcccaggtaaagatgcgttgcttcacatttcacaaatttcaaaaaatagaattgaaaaagtggaagatgtattaaaaatcggtgacacaattgaagttaagattactgaaattgataaacaaggtcgagtaaatgcttcacatagagcattagaagaataatatttaaagtcatatgacgacaatgtatcgtcatgtgattttttttatgccattttttacgaagtgatccattttgaatttgttgtattgaacattttaaaacgctttattattttgtgtgcaactgttaattatcctgtatgtatagtgattaatagtgtacatcaagtgttttttaacttataatgaatagtgagtttatatatggacgggtaacaaatttaggaggtaagattttgagtttaataaagaaaaagaataaagatattcgcattataccattaggcggtgttggcgaaattgctaaaaatatgtatatcgttgaagtagacgatgaaatgtttatgttagatgctggacttatgtttccagaagacgaaatgctaggtattgatattgttataccagacatttcatacgtacttgaaaataaagataaattgaagggtatattccttacacacggacatgagcacgcgattggtgcagtgagttatgttttagaacaattagatgcaccagtatatggatctaaattgacaatagcgttaattaaagaaaatatgaaagcccgtaatattgataaaaaagttcgctactacacagttaataatgattcaattatgagattcaaaaacgtgaatattagtttctttaatacgacacacagtattcctgatagtctaggtgtttgtattcatacttcatatggtgccattgtgtatacaggtgaatttaagtttgaccaaagtttacatggacattatgcaccagatattaaacgtatggcagagattggtgaagaaggcgtatttgtcttaatcagtgattctactgaggcagagaaacctggatataatactccggaaaatgtgattgaacatcatatgtatgacgcttttgcaaaagtgcgaggtcgcttgattgtttcatgttatgcttcgaactttatacgtattcagcaagttttaaatattgctagcaagctaaatcgtaaagtgtcatttttaggaagatcacttgaaagttcatttaatattgctcgtaaaatggggtatttcgacattcctaaagatttgctaattcctataacagaagttgataattaccctaaaaatgaagtgataattatagctactggtatgcaaggagaacctgtagaagccttaagtcaaatggcgcaacataagcataaaattatgaatatcgaagaaggcgattctgtatttttagcaattacggcttctgctaatatggaagttatcattgcgaatacattaaatgagcttgtacgtgctggcgcacatattattccaaataacaagaagattcatgcttcaagtcatggttgcatggaagaattaaaaatgatgattaatattatgaaacctgaatactttattcctgtacaaggtgaatttaaaatgcagatagcacatgcgaagctagcagctgaagcaggtgttgcaccagaaaagattttccttgtggaaaaaggagatgtcattaattacaacggtaaagatatgatattaaatgaaaaggtaaattcaggaaatattttaatagatggtattggtattggggatgtaggaaatatcgtgttgagagaccgtcatcttttagcagaagatggtatctttattgctgtagtaacgttagatcctaaaaatagacgtatagctgcgggacctgaaattcaatctcgtgggtttgtatatgtacgtgaaagtgaagacttattacgtgaagcagaagagaaagtacgtgaaatagtagaggctggtttacaagaaaaacgcatagaatggtctgaaattaagcaaaatatgcgtgatcaaattagtaaactattattcgaaagtacaaaacgtcgtcctatgattattccagtaatttctgaaatttaatcaaaaagtcattaacataaaagaggtcagaacaagtcactgaaatataatggttgtcatggacaatttacttatattttatgatggtcaattgaaaggggtaacgattaatctgttatcttaagtaaattgatacatagatgatattgttctaacctctttcatcgtctgtttggactacatattctaaacatcaaataggaaattatatataataacgtcgttttaactaaggcaacataaggaggtgcgtcaattggcacaagcaaaaaagaaatcgacagctaagaaaaaaacaacatcaaaaaaagaacaaattcgaggaaaaagaagaatgataatccgatacgttatgtcatagctattttagtagttgtattaatggtgttgggtgttttccaattaggaataataggtcgtctaattgacagcttctttaattatttatttgggtacagtagatatttaacatatattttagtactcttagcaactggttttattacatactctaaacgtattcctaaaactagacgaacggctggttcgattgtattgcaaattgcattgctatttgtatcacagttagtttttcattttaatagtggtatcaaagctgaaagagaacctgtactttcttatgtgtatcagtcataccaacacagtcatttcccaaattttggtggcggtgtattaggcttttatttattagagttaagcgtacctttaatttcattatttggtgtatgtattattactattttattattatgctcaagtgttattttattaacaaaccatcaacatcgtgaagttgcaaaagttgcactggaaaatataaaagcttggtttggttcatttaatgaaaaaatgtcggaaagaaaccaagaaaaacaattaaagcgtgaagaaaaagcgagacttaaagaagaacaaaaggcacgtcaaaatgaacagccacaaataaaagatgtgagtgattttacggaagtgcctcaagaaagagatattccaatttatgggcatactgaaaatgaaagtaaaagccagagtcaaccaagtcgaaaaaagcgagtgtttgatgcagagaatagttcgaataacatcgtaaatcatcatcaagcagatcagcaagaacaattaacagaacaaactcataacagtgttgaaagtgaaaacactattgaagaagctggtgaagttacgaatgtatcgtatgttgttccaccgttaactttacttaatcaacctgcaaaacaaaaagcaacatctaaagctgaagtgcaacgtaaaggacaagtactagagaatacattaaaagattttggggtaaatgcaaaagtgacacaaattaaaattggtcctgcagtaactcaatatgaaattcaaccagctcaaggggttaaagtgagtaaaattgtaaacttgcataatgatattgcattagctttagcagcaaaagatgttagaatcgaagcgccaatacctggtcgctctgcagtaggtattgaagtgccaaatgagaaaatttcattagtttcactaaaagaagttttagatgaaaaattcccgtctaataataaactagaagttggattaggaagagatatatcaggtgatccaattactgttccactaaatgaaatgccacacttattggtggcaggatcgacgggtagtggtaaatctgtttgtataaatggtattattacaagtattttattaaatgctaagccgcatgaagttaaacttatgttaatcgatccgaaaatggttgaactaaatgtttataacggaattccacatttattaattccggttgttacaaatcctcataaagctgctcaagctttagaaaaaattgtagctgagatggaaagacgttatgatttattccaacattcatcaactagaaatattaaaggttataacgaattaatccgtaagcaaaatcaagaattagatgagaagcaaccagaattaccttatatcgttgttattgtagatgagcttgcagatttaatgatggtagctggtaaagaagttgaaaatgcgattcaacgtatcacacaaatggcacgtgcagcaggtatacatttgattgtagcaacacaaagaccttctgtggatgtaattacaggtatcattaaaaataacattccatctagaattgcttttgctgtaagttctcaaacagattcaagaactattattggtactggcggcgcagaaaagttacttggtaaaggtgacatgttatacgttggaaatggtgactcatcacaaacacgtattcaaggggcgtttttaagtgaccaagaggtgcaagatgttgtaaattatgtagtagaacaacaacaggcaaattatgtaaaagaaatggaaccagatgcaccagtggataaatcggaaatgaaaagtgaagatgctttatatgatgaagcgtatttgtttgttgttgaacaacaaaaggcaagtacatcattgttacaacgccaatttagaattggttataatagagcatctaggttgatggatgatttagaacgcaatcaggtaatcggtccacaaaaaggaagcaagcctagacaagttttaatagatcttaataatgacgaggtgtaaaaaatgtcagaaatgaatgcggtatataacgttaaacaatacattttaaatttgattaagcaaaataaattggaatatggtgaccaacttccaagtaatttatcaattgccagagaattaaatgtaaaaaccgacgatgtttatgaagcaattcaggcattgattactgaacaagtcattaaagataattttgaagagggcacaagtgttaagtcactgccccctttcttttatccattgaatgaacttataagtattgggcaaatgattaaaaatgcaggatttgaatgcggaactgaatacttaaattttgatgagcaaccagcaactatgttagatgcaaatttgttgagcgttgaagaaggatatccagtaaccattatagaacgattacgaactgccgatggagaaccggtcgtctattgtttagataaaattgctaaaaaagaattaacatgtacagagtatcaaatgagcaatggatcgattctaagtgcgataaaagaacaaagtaatcataatatttgttatgctgatacagaaattgaagcggtaaattatgaacctcgaatatccgaagtactgaatgcttcgccacacgaaggtttgattttattaaaaattacgcactacaatgaatcagatgaacctattttgtattcattaaattatatgaaaaatagcttagttcaatttaaaatcactagaaaaatatagatgtaagaagatatagaggaggctatatatttgagtagacaatctcaaccaaatatacatatcaaagtttcaccaacaactaaatttaaaacaactactatagtttttaaatttatggcacctttagaatatgacacaataacagctagatcattattaagcaaattattagttcgagcaactaagaaatggccaaccgataagtcgtttaataatcacttagccgatttatatggtgcgtatgtgaatagtacaatttcaaaattcaaagatcagcatgtcattacattttcattagaaattgttaatgaacgttatttaagaaacggtgaatcattatttaatcaaggattagatttattacaagaaatcatttggaatccattaattgaaaataaagcattcaatgataattttgttaaccaagagaaaacattattagccaaaaaaatagaagcaatggtagataataaagcacaatattcgtttttaaaattactcgaccatatgtttgaaaatgaagcatataaatacttatctacaggacaactagaacaaatcccacatattactgctgaaacactatatcatacatatcaatcaatgattaataatgatcaatgttctgtttatgttgtcggcaatgtagaacctgaaagtgttgagaaacaaatacgtgaaaaatttgcacttaaaccattcgataaacatcaattccaacattctacacatcatttacacgatgaagaagttgattatattgttgaatatgatgacgtggatcaagctaaattaaatatgggatatcgttttccaacacaatatggacaaagtggatatgctgcttttgttgtatttaacatgatgtttggaggagatccttcatctgttttatttaatgaagtgcgagaaaagcaaagtttagcgtactctatacattcacaaattgatggcaaaaatggctatttatttgttttgagtggggtttcaagtgataagtacgaaactgcaaaagacactattataagtgaatttgaaaaaataaaagcaggagatttcactgaagaaaaattagagttagctaaaaaagtaatcatttctcatcgatatgaatctgaagatcgtccgaaaagtattatagagattatgcataaccaaatattattagagcaaccacaaagcaaagaaacatttataaatgatatacagaaggtaagtcgcgaagatattgtttctgttgctgaaaaagcatttttagatacaatctatgtgttgacaaaaggagggggtaaataatgaaagagcgttattatgaattaatagacgaaagagtattcgaacaagaattagaaaatggtttacgattatttgttatccctaaaccaggttttcaaaagacatttgtcacttacactacacaatttggttcattagataatcaattcaaacccctcggacaagaccaatttgttactgtacctgatggagttgctcactttttagaacataaattatttgaaaaagaagaagaagacttatttactgcgtttgctgaagataatgcacaagcaaatgcgtttacaagctttgatcgtacaagctacttgttcagtgcaactgataatattgaaaacaacattaaacgtttacttacaatggttgaaacgccttattttacaaaagaaactgttgataaagaaaaaggtattattgcagaagaaataaaaatgtatcaagaacaacctggatataaattaatgtttaatacattgcgtgcaatgtatcaacaacatccaatacgtgttgatattgccggtagtgtagaaagtatatacgatattacaaaagatgatttgtatctatgttatgaaacgttttatcatccatcaaatatggttttatttgttgttggtgatgtgaatccagaagaaatatgtcgaatagtaaaacaacacgaggatgctcgtaataaagttaaccaacccaaaatcgaacgaggacttgttgatgaaccggaggatgttaaagaagcatttgttactgaatctatgaaaattcaatcaccaagactaatgcttggttttaaaaataaaccattacaagaagcgcctcaaaaatatgtacaacgtgatttagaaatgtcattattctttgagttaatttttggggaagaaacagatttttatcagaatttattaaacgaaggacttatcgatgatacatttggttatcaatttgtactagagccgacgtatagtttttcaatcgtgacaagcgctactgaagaaccagataaattaaaaaaattattattagatgagttgcgtgataaaaaaggcaatttccaagatgcagaagcatttgaacttttgaaaaagcaatttataggtgagttcatatcaagtttaaactcacctgaatatattgctaatcaatatactaaattgtattttgaaggtgttagtgtgtttgacatgttagacattgttgaaaacatcacgttagatagtattaatgaaacgtcatcgttatatttaaatttagatcagcaagtcgatagtcgtttggagattaaaaagtaatgaaagcattagtattaggtggttctggttcaattggttctgagatagtcaaacaattattaactgatggatttgaagtttatgtgcaatattatcgtactgatataaatgaattaactagcaaatttaatgatgataaagttcgttttatacaagcggatttatctcaaacaattgatattgacaaaacatttggtgacattaaatcattagactgtttaatatatgcaagtggtcagtctttatatggtgttttacaagatatgaaagaccatgatattgatgcatgttatcagttaaatgtcttgcaattaattcgattatgtagatatttcgttgatgttttacgtcaaagtgacaatggaagaattattgtaatttcatcaatttggggtgagacaggagctagtatggaaactatttattcgacgatgaaaagtgcacaattaggtttcgttaaggcgcttagtcaagagcttgtactaacatcagtgacagtaaatgctatcgcacctggatttgtagccggtaatatggcaagtgagtggcaagaagatgaacttcaagcaatgataactgaattaccacaacagcgattgattttaccgagtgaggttgctcatacatgcgcctatttatatcacccaaatgctagaagtgttactggaactatacagaaagttaatggtgcttggtatatttaaaatatagaactatttttatgagcaaatgtttttatgattgatgttataatatgaatattacaatgaatcataatttgttaattaaacaaggggtgaggttcaccatgacagttgcagagaaaaaagaatggtacctagaatacgaaattgaaattaatagaccgggtcttttaggtgatgtatctagtttattaggtatgttaggtataagtattgttacaattaatggtgttgatcaaggtaaacgaggccttttaattaaaacagacaatcttgaaaaagttgaacgttttgagcaaatagctcgtggtataaatgaaattgaaataacaaagcttaaaaaaccagaattaagagaccgtcttgcagtaagacatggtagatatattgagcaagatgcaaaagataagaaaacctttcgatttgagcgtgaagatttaggcttgttagtagactttttagctgaattgttcaaagaagaaggtcataagttgattggcattagaggtatgccacgagttggtaaaactgaatcaattgttgcgggaagtgtttgtgcacataagagatggttatttattagttctactttaataaaacaaactgtacgtagctctctaattaaaggggaatatgatgccaatcatgtatacattattgatggtgcagttactgccagagaatctaatccaaaacatcaagagcttgttaacgaagttatgacgttaccatcaatcaaagtcgttgaacatccagatttatttgttgaaacaagtacttgtacaatggaagattttgactatattatcgaattgagagaaaatgaaaatcaagaaatacattacgaagaaatgaagaaacagacagtccaaagtaagaataatttagattttggagatccgtttggtggtggttttggtttcttcgagtaagtgtaaggaggctatgaattgaaaacggtcggtgaagcgctaaaaggtagacgtgaaaggttaggaatgactttaacagaattagagcaacgtactggaattaaacgtgaaatgctagtgcatattgaaaataatgaattcgatcaactaccgaataaaaattacagcgaaggatttattagaaaatatgcaagcgtagtaaatattgaacctaaccaattaattcaagctcatcaagatgaaattccatcgaaccaagccgaatgggacgaagtaattacagttttcaataataataaagacttagattataagagtaaatcaaaagagccaatacaattattagtaatcatgggtattacagttttaataactttattgttatggatcatgttagttttaatattttaacagaaataaattagtgagaaatgaggatgtataatgaatattccgaaccagattacggtttttagagtagtgttaataccagtttttatattgtttgcgttagttgattttggatttggcaatgtgtcatttctaggaggatatgaaataagaattgagttattaatcagtggttttatttttatattggcttcccttagcgattttgttgatggttatttagctagaaaatggaatttagttacaaatatggggaaatttttggatccattagcggataaattattagttgcaagtgctttaattgtacttgtgcaactaggactaacaaattctgtagtagcaatcattattattgccagagaatttgccgtaactggtttacgtttactacaaattgaacaaggattcgtaagtgcagctggtcaattaggtaaaattaaaacagcagttactatggtagcaattacttggttgttattaggtgatccattggcaacattgattggtttgtcattaggacaaattttattatacattggcgttatttttactatcttatctggtattgaatacttttataaaggtagagatgtttttaaacaaaaataaatatttgtttatactagatttcattttcatatggaatctagtttttttaatcccaattttagaaattagccacgcaattgtttataatgatatattgtaaaacaatattcgttcatttttttagggaaaatctgtagtagcatctgatacattgaatctaaaattgatgtgaatttttaaatgaaatacatgaaaaaatgaattaaacgatacaagggggatataaatgtcaattgccattattgctgtaggctcagaactattgctaggtcaaatcgctaataccaacggacaatttctatctaaagtatttaatgaaattggacaaaatgtattagaacataaagttattggagataataaaaaacgtttagaatcaagtgtacgtcatgcgctagaaaaatatgatactgttattttaacaggtggcttaggtcctacgaaagatgacttaacgaagcatacagtggcccagattgttggtaaagatttagttattgatgagccttctttaaaatatattgaaagctattttgaggaacaaggacaagaaatgacacctaataataaacaacaggctttagtaattgaaggttcaactgtattaacaaatcatcatggcatggctccaggaatgatggtgaattttgaaaacaaacaaattattttattaccaggtccaccgaaagaaatgcaaccaatggtgaaaaatgaattgttgtcacattttataaaccataatcgaattatacattctgaactattaagatttgcgggaataggtgaatctaaagtagaaacaatattaatagatcttatcgataaacagactaatcctacgattgcgcctttggcgggaagtcatgaagtatatattagattgactgcaaatgccgactcaaaagaacaagcacaatcattgattcaacctgttaaacaagaaattcttgatcgtattggagaatattattatggttcagatgacacattaattgagcaagctgtaataaagaaaattcatgaaccttttgtaatatatgatggtattactaatggtgctttatatcatcgattgaaagaagtggatttaaacgatgttctaaagggtatgattaatcacaatgaaaactttgttgatattaataaacctattgagcagcaattaaaagatgcagtgcaatttgttaataaattgtttaatgtgtcatcagcaattattctattagagtatgatggtgtagtccatataggctatgataataactttgaatttaaaactgagcaatttaaaatgtctaaatctagaaatttattaaagaacagaagtcaaaattatgcgctcataagattattaaattggcttagaacaacaaattaattgtattatcgataaaaatataagcacgtttgttcgtttttgcgttttgatttcaagattttatacgaacaaatattcgcaaaacacttgtattttattttgaatccttgtatagtattggtaagataattaaaagatagcaatttcaattaggaggtctcgctttggataacgatcgtcaaaaagctttagatacagtaattaaaaatatggagaaatctttcggtaaaggtgccgtaatgaagttgggtgacaatataggtcgccgagtttcaactacatcaactggttcagttacattagataatgcgctaggtgtaggtggctatcctaaaggacgaattattgaaatttatggtcctgaaagttctggtaagacaacagtagcgcttcacgctattgctgaagtacaaagtaatggcggggtggcagcatttatcgatgctgaacatgctttagatccagaatatgctcaagcattaggcgtagatatcgataatttatatttatcgcaaccggatcatggtgaacaaggtcttgaaatcgccgaagcatttgttagaagtggtgcagttgatattgtagttgtagactcagttgctgctttaacacctaaagctgaaattgaaggagaaatgggagacactcacgttggtttacaagctcgtttaatgtcacaagcgttacgtaaactttcaggtgctatttctaaatcaaatacaactgctattttcatcaaccaaattcgtgaaaaagttggtgttatgttcggtaatccagagactacaccaggtggacgtgcattaaaattctatagttcagtaagactagaagtacgtcgtgcagaacagcttaaacaaggacaagaaattgtaggtaatagaactaaaattaaagtcgttaaaaataaagtggcaccaccatttagagtagctgaagttgatattatgtatggacaaggtatttctaaagagggtgaacttattgatttaggtgttgaaaacgacatcgttgataaatcaggagcatggtattcttacaatggcgaacgaatgggtcaaggtaaggaaaatgttaaaatgtacttgaaagaaaatccacaaattaaagaagaaattgatcgtaaattgagagaaaaattaggtatatctgatggtgatgttgaagaaacagaagatgcaccaaagtcattatttgacgaagaatagtacacaaatttatatctatagttaaacttagcaaatatccttataggattgattgaaagtgatattcattacataaagctagaataatatctaactttatgggatacactacaaatcgagactataaggttttttattttatttattattacattatcaatagttttataatcgagcttcaaaactttagaaaatagtagaaatagcattcaatatagtgcaaaagtgcaaattgataacttgacacttatctcctataaaccgtacaattaatttgtatgatttatatataatttcataaagtcatattgaatttcatataaagagcaaaccctagaaaaggaggtgtttgtgtgaatttattaagcctcctactcattttgctggggatcattctaggagttgttggagggtatgttgttgcccgaaatttgttgcttcaaaagcaatcacaagctagacaaactgccgaagatattgtaaatcaagcacataaagaagctgacaatatcaaaaaagagaaattacttgaggcaaaagaagaaaaccaaatcctaagagaacaaactgaagcagaactacgagaaagacgtagcgaacttcaaagacaagaaacccgacttcttcaaaaagaagaaaacttagagcgcaaatctgatctattagataaaaaagatgagattttagagcaaaaagaatcaaaaattgaagaaaaacaacaacaagtagatgcaaaagagagtagtgttcaaacgttaataatgaagcatgaacaagaattagaacgcatctccggtctcactcaagaagaagctattaatgagcaacttcaaagagtagaggaagaactgtcacaagatattgcagtacttgttaaagaaaaagaaaaagaagctaaagaaaaagttgataaaacagcaaaagaattattagctacagcagtacaaagattagcagcagatcacacaagtgaatcaacggtatcagtagttaacttacctaatgatgagatgaaaggtcgaatcattggacgagaaggacgaaacatccgcacacttgaaactttaactggcattgatttaattattgatgacacaccagaagcggttatattatctggttttgatccaataagaagagaaattgctagaacagcacttgttaacttagtatctgatggacgtattcatccaggtagaattgaagatatggtcgaaaaagctagaaaagaagtagacgatattattagagaagcaggtgaacaagctacatttgaagtgaacgcacataatatgcatcctgacttagtaaaaattgtagggcgtttaaactatcgtacgagttacggtcaaaatgtacttaaacattcaattgaagttgcgcatcttgctagtatgttagctgctgagctaggcgaagatgagacattagcgaaacgagctggacttttacatgatgttggtaaagcaattgatcatgaagtagaaggtagtcatgttgaaatcggtgtagaattagcgaaaaaatatggtgaaaatgaaacagttattaatgcaatccattctcatcatggtgatgttgaacctacatctattatatctatccttgttgctgctgcagatgcattgtctgcggctcgtccaggtgcaagaaaagaaacattagagaattatattcgtcgattagaacgtttagaaacgttatcagaaagttatgatggtgtagaaaaagcatttgcgattcaggcaggtagagaaatccgagtgattgtatctcctgaagaaattgatgatttaaaatcttatcgattggctagagatattaaaaatcagattgaagatgaattacaatatcctggtcatatcaaggtgacagttgttcgagagactagagcagtagaatatgcgaaataatttttgtctccctcacaaattagtgagggagcttttttaagttgtagtcttaatctagttagacagcactttatcggtaataactatattaaacagtagttatttgaaagtaagacggaccttatattaaataagaagttattgcttttaataaaaatgttttaggcttcgtaattactatatttatattatgtaaacctataaagatgattgcttttctatccaataaaaaagaagagaagatgtaacacatcttctcttctgcaatattaattaggatttatttctaagttgagttattttaattgtaaatctgttttctttaattcttttataacttctgcagtatcataacaatttgttgcaattgttgaatatctctctgctaaacgatatgcattaatgtaaagctttaaactttctttagctatatcctctgcatcttcgaattttgatgggttagacataaccactaattctgcaaatttttctggatcaatattaatagacatgtatttatttacaactcctatttattttgatgtcttaatactaacatattgaagttttcagacaaagtaatgtctctttataattgaagaaaaataattcaaagaatttaatatttactttaaatattagaacgtatgaattaaactagtatttatgagaggatgaacaaaacatgagaataatgtttataggggatatcgtaggtaaaattggacgagacgcaattgaaacgtacatacctcaactgaagcaaaagtataaaccaacagttacaattgtaaatgctgaaaatgcagcacatggtaaaggtttgactgaaaaaatatataaacaattactaagaaatggtgtagatttcatgactatgggtaatcacacatatggtcaacgtgaaatttatgattttatagatgaagcaaaacgtctagtaagaccagcgaattttccggatgaagcgccgggaattggtatgagatttatacaaattaatgatattaaacttgcagttattaatctgcaaggaagagcgtttatgccagatattgatgatccttttaaaaaggcagatcaattagtcaaggaagcacaagaacaaactccgtttatatttgttgattttcatgcagaaacaacttctgaaaagtatgcaatgggatggcatttagatggtagagctagcgctgttgttggaacgcatacacacattcaaacagcagatgaacgtattttaccaaaggggacagggtatataacggatgttggtatgacaggtttttatgacggcattttaggaataaataaaacagaggtaattgagcgttttatcactagtttgccacaaagacatgttgttccaaatgaaggtagaagtgtattatctggtgttgttattgatttagacaaagaaggtaaaacaaagcacatcgaacgtatattgataaatgatgaccatccattttcaacattttaaaattacgtaagtaaacattcgaattggaccctatcgtccattagtatgaatttaatatagtaccactgtttacatagtaaatcggtggttctttttgttatcatttaatatgaaatatatccataggaggcatataactatgaaaccacaattatcgtggaaagttggcggtcaacaaggcgaaggtattgaatcaactggggaaatcttcgctacggctatgaatagaaaaggatattatttatatggatatagacatttttcaagtcgtatcaaaggtggacatacgaataataaaattagagtttctacgacgcctgttcatgcaattagtgatgatttagatattttgattgcatttgaccaagaaacaattgatgttaaccatcatgaaatgagagaagacagtattattttagctgatgccaaggctaaacctgtgaaaccagaaggatgtcatgcacagcttattgaattaccttttacagcaaccgctaaagaattaggtacagcattaatgaaaaacatggttgcaataggtgctactagcgcattgatgaatttgaatacaaatacatttgaagaacttattactaatatgttttctaaaaaaggtgacaaggtagttgaagtcaatatccaagcattaaacgaaggttatcaattaatgcaatcccgcttacctgaaatcgacggggactttgaattagagtcaacagatgcactaccacatctatatatgattggtaacgatgccattggattaggtgcaattgctgcaggttcacaatttatggcggcatatcctattacacctgcgtctgaagttatggaatatatgattgccaatatatctaaagtaaacggagcggttattcaaacagaagatgaaattgctgctgtaactatggctattggtgcaaattatggtggagtcagagcgtttacggctagtgctggtccaggtttatctttaatgatggaagcaattggattatctggtatgactgaaacgccattagtcattattaatactcaacgaggtggaccttctactggattacctacgaaacaagaacagtcagatttaatgcaaatgatttatggtacacatggtgatattccaaaaatagttgtagcaccaactgatgcagaagatgcattttatttaactatggaagcctttaatttagcagaacaatatcaatgccctgttatagttttaagtgatttgcaattatctttaggtaaacaaactgttgaaaaattagattataatcgcattgaaattaaacgtggtgaaatcattcaatctgatattgaacgtgaagaagatgataaaggttatttcaagcgttatgcgttaacatccaatggtgtttctcctagacctatccccggtattaaaggaggtattcatcatataactggtgtggaacacaatgaagaaggtaaacctagtgaatctgcatcaaatagacaacaacaaatggaaaaacgaatgcgtaaaattgagcagttactaattgaatcgccagtagaagctaacttacaacatgaagatgcagatattctttatatcggttttatttctacaaaaggtgcaattcaagaaggtagtaaccgtttgaatcaacaaggcataaaagttaacactatacaaattagacaattgcatccattcccaacaagcgttattcaagatgcagttaataaagcgaagaaagtcgttgtagtggagcacaattatcaaggacaattggctagtattataaaaatgaatgtcaatattcatgataagattgaaaattatacaaagtatgatgggacacctttcctaccacatgaaatcgaagtaaaaggcaaaataattgctactgaaataaaggagatggtatagatggcgacatttaaagattttagaaataatgttaagcctaactggtgccctggatgtggcgatttctcagtacaagctgcaattcaaaaagcagccgcaaatatagggttagaacctgaagaagtagctatcatcaccggtataggatgttctggccgtctttcaggatatattaattcttatggcgttcattctattcacggacgtgcattacctttagctcaaggtgtaaaaatggcgaataaagatttaactgttattgcatctggaggagatggtgatggttatgctataggtatggggcatacaatccatgctttaagaagaaatatgaacatgacgtatatagtcatggataatcaaatttatggtttgacaaagggacaaacatcgccgtcatcagcagtaggatttgttactaaaacaacgccaaaaggtaatatagaaaaaaatgttgcgcctttagaattagcattatcatctggtgccacatttgtagcccaaggtttttcaagcgatattaaaggattaacaaaactaattgaagatgcaattaatcatgatggattttcattcgttaatgtcttttcaccatgtgtgacttataataaaattaacacatacgattggtttaaagaacatttaacaagtgttgatgacattgaaaattatgattctacagataaacaattagcgactaaaactgttattgaacatgaatctttagtaactggtattgtttatcaagataaagaaacaccatcatatgaatctcaaattaaagagttagatgatacaccacttgctaaaagagatatcaaaattactgaagacaccttcaatgcattaactgaacaatttatttaataattaaaactgagtcgtataaatgtatttataacagatccatttatgctactcagttttttactattacaaaaaataaaggagtttttaaaatgaaagacacattaatgagtatacaaataattcctaaaacaccaaacaatgacaatgttataccttacgtagacgaggcgattaaaataattgacgaatctggtatgcattttagagtaggtccgttagaaacgacagtacaaggaaatatgaatgaatgtttaattttaatacaatcattaaatgaacgaatggtggaacttgaatgtccaagtattattagccaagttaagttttatcatgtgccagatggcatcactattgaaactttaactgaaaaatatgatgaataacattaaaagtgaagtaaactggatttgaattggcttgttagagatgacgtataactttaactgtttttgcactttatagttaaatttaatataattattaaatgatacgggcaaatagaaaggattttgtaaagtgaacgaagaacaaagaaaagcaagttctgtagatgttttagctgagagagataagaaagcagaaaaagattatagtaaatattttgaacatgtttatcagccgcctaatttaaaagaagcgaaaaaaagaggtaaacaagaagttcgttataatagagattttcaaattgatgaaaaatatcgcggtatggggaacgagcgtacatttttaattaaaacatatggatgtcaaatgaatgcacatgacactgaggtcattgctggtatacttgaagcattaggctatcaagcaacgactgatattaacactgcagatgttattttaattaatacatgtgcgattagagaaaatgccgagaacaaagtgtttagtgaaataggtaatttgaagcatttgaaaaaagaacgacctgatattttaatcggtgtttgtggttgtatgtcacaagaagagtcagtagtgaataaaattttaaaatcgtatcaaaatgtagatatgatatttggtacacataatattcatcatttaccagaaattttagaagaagcatacttatctaaagcaatggttgttgaagtatggtctaaagaaggagacgttattgaaaatcttccaaaagtccgtgaaggcaacattaaagcatgggtcaatattatgtatggttgtgataagttttgtacatattgtattgttccatttacaagaggtaaagaacgaagccgtagacctgaagacattatagatgaagtacgtgaacttgctcgtgaaggttacaaagaaataacgcttttaggtcaaaatgtaaattcttatggtaaagatttacaggatatagaatatgacttaggagatcttttacaagcaatttctaaaatagcgattccaagagttcgtttcacaacaagtcatccttgggactttacagatcacatgattgatgttatttcagagggtggtaatatcgttccgcatatccacttgccagttcaatctggaaataatgcagtattaaaaataatgggtagaaaatatacacgagaaagttatttggatttagtaaaacgaatcaaagatagaattcctaatgtagcattaactacagatattattgtagggtatccaaatgaatcagaggaacaatttgaagaaactttaactctgtatgatgaagttggttttgaacatgcatatacgtatttgtattcacaacgtgatggtacgcctgctgctaaaatgaaagataatgtacctttaaatgtcaaaaaggaacgattgcaacgtttgaataaaaaagttggtcattattcacaaatagctatgagtaagtacgaaggacaaactgtaacagtactttgtgaaggtagtagtaaaaaagatgatcaggttcttgctggctacactgataaaaataagctagttaatttcaaagcacctaaagaaatgattggtaaactagtggaagtacgaatagatgaagctaaacagtattcattaaatggcagttttgtaaaggaagtagagccggaaatggtgattcaataaatgtataataaagatgacgtgttgaaacaagcggataatattgcaaataaaattaaaaatttggatactatcaaaacatatcaacaaattgaagcacagattcatcagaaccaaacgataaagactaaaatggatatgttaaaaaagcatcaaaaacaagcagtaaactttcaaaattacgggaaacaaaatgcgctagaacagtcggaacataccattcaaagtatagaagcagaaataaatacattgcccatagttgaacagtttcaaacttcacaatatgaagcgaatcaattattgaaaatgtttgtatcaacaatggaaacacgtttaaatgaccataataaagccaagcatagtgattaattacaaacaaaaaggagaacaatcatatgaaatcaagaaaactggctataactgcacttttaattgcaataaatgttgtattaagcagtattatcatcattcctctaggaccagttaaggcagcaccagtacagcattttgtaaatgtattaagtgcggtcatagtaggtccttggtatggattagctcaagcgcttatatcatcaattttaagagttctttttggtactggtacagcttttgcatttccgggtagtatgattggagttttattggctagtatgttttacatatatcgtaaacatatatttatggccgcggtcggtgaagtacttggaactggtgtcatcggaagtttaatttgtataccattagcatatttcctcgggcttcaagacttcttcattaaaccgttaatgattacgttcatagtctcaagtgctatcggatctattataagttatttcttattaattactctaaaaaaacgtggtattcttcaaaggtttataaaataatttaatgatatatgatttcaaacagagtcattgttcattttaatattgaacgcccttacttaattaaatgtcttgaatgctagaattttaatttaattctaaacatgctattgacacattttattaggtttgaggcgttttcttatacatttaagatgcttcgtgattatatggtatgaataggtttgtaaaagtaagtatgttaaaatgtataagttaaataattaataattaaaaagcttacaaacgaatatattgtaaagacaaattttaaaaagagacaagggttgtgaagaaataatatgtctaatgttacaccaatgatgcagcaatatttaaaaataaaatcagaataccaagattgcttattattttttagactaggtgatttctatgaaatgttttatgaagatgccaaggaggcatcacgtgtacttgaaattactttgactaaaagagatgctaaaaaagaaaatccaattccgatgtgtggtgttccgtatcattctgcagatagttatatagatacacttgttaataatggatataaagtagctatttgtgaacagatggaagatccgaaacaaacgaaaggtatggttagacgtgaggtagtaagaattgtgactccaggaactgtgatggagcaaggtggtgtagatgataaacaaaataactatattttaagttttgttatgaatcaacctgaaattgcgcttagttactgtgatgtttctactggcgaattaaaggttacacattttaatgatgaagcgactttattaaatgaaattacgacgataaaccctaacgaagttgttatcaatgacaatatttccgatcatttaaaaagacaaattaatatggtgacagaaacaataacagtcagggaaacgttatcatcagaaatctatagtgtgaatcaaactgaacataaattaatgtatcaagcgacacaattattgctagattatattcatcatacacaaaaacgtgatttatcgcatatcgaggatgttgttcaatatgcagctatagattatatgaaaatggatttttatgctaagagaaaccttgagttaacggaaagcattcgattaaaatcaaaaaaaggaacgctactttggctaatggacgaaacgaaaacaccaatgggagcacgccgcttaaaacaatggatagatagaccactaataagtaaagaacaaattgaagcacgattagatatcgttgatgaatttagtgctcatttcatagaaagagacaccttaagaacatatcttaatcaagtgtatgatattgaacgtcttgttgggcgtgttagttacggaaatgttaatgcgagagatttaattcaacttaaacattccatttctgaaataccgaatattaaagcattactaaattctatgaatcagaatactcttgtacaagttaatcaactagaaccccttgatgatttacttgatatattagaacagagtttagtagaagaaccaccaatttcagttaaagatggcggactattcaaagttggttttaatacgcaattagatgaatatcttgaagcttcaaaaaacggaaaaacatggttagcagaattacaagccaaagaaagacaacgtacaggaataaaatcattgaaaataagctttaataaagtgtttggttattttatagaaataacacgtgccaacttgcaaaattttgaaccaagtgaatttggttatatgaggaagcaaacgttatcgaatgctgaacgttttataactgatgaacttaaagaaaaagaagatatcattttaggtgcggaagacaaagccatcgaattagaatatcaattatttgttcagctacgtgaagaagttaaaaaatatactgaacgtttacaacaacaagctaaaattatttcagagctagattgtttacagagctttgcagaaattgctcaaaaatataattacactaggccttcatttagtgaaaataaaacattagaattagtggaatctaggcacccagtagtggaaagagtaatggattataatgactatgtgcctaataattgtcgattagataatgaaacatttatatatttaattacaggtccgaatatgtctggtaaatcgacatatatgagacaagttgccataattagtataatggcccaaatgggagcttatgtcccttgtaaagaggcagtgttacctatatttgatcaaatattcactagaataggtgcggcagatgatttggtttcaggtaagagtacgtttatggtagaaatgctagaagcacaaaaggcattaacttatgcaacagaggatagtttgattattttcgatgaaattggacgtggtacttcaacgtatgacggtttagctttagcgcaggcaatgatagagtatgtagctgaaacatcacatgctaaaacgttattttcaacacattatcatgaattgacaacattagatcaagcattaccaagtctaaaaaatgttcacgtcgctgctaatgaatataaaggtgaacttatattcttgcataaagtcaaagatggtgcagttgacgatagttatggtattcaagttgcgaaattagctgatttacctgaaaaagttattagcagagcacaagtgatcctaagcgagtttgaagcgtctgctggtaaaaaatcatcgatatcaaatttaaaaatggtcgaaaatgaacctgaaattaatcaagaaaattcaaacgtaagtgttgaagaaacaactgatactttatctcaaaaagactttgaacaagcatcatttgatttgcttgaaaatgatcaagaaagcgagattgaactacaaattaaaaatttgaatttatctaatatgacaccaattgaggcattggtgaagttaagtgaattacaaaatcaattaaaatagaggtgttgcaaaatggggaaaattaaagaactccaaacctcattagcaaataaaatcgcagcaggtgaagtagttgaaagaccgagttctgttgtgaaagaactgttggaaaatgctatagatgcaggcgctacagaaataagcattgaagtagaggaatctggcgtccaatctattcgcgtagtcgataatggaagcggaattgaagcggaagacttaggattagtatttcataggcatgcgactagtaaattagatcaagatgaagatttatttcatattaggacattaggattccgtggtgaagcactagccagtatttcatcagttgctaaagtaacattgaagacttgcacggataatgctaatggaaatgaaatatatgtagaaaatggtgaaatattaaatcataagcctgcaaaagcgaaaaaaggaacagatatacttgtagaatcattattttataatacaccagcacgtttaaaatatattaaaagtttatacactgaactaggtaaaataacagatattgtcaacagaatggcaatgagccatccggacattcgaatagcactcatttcagatggcaaaacaatgttaagtacaaatggttcaggacgaactaatgaagtgatggcagagatttatgggatgaaagttgcacgagatttagtacatatatctggagatacaagtgattatcacattgaaggttttgttgcaaagcctgaacattctagaagtaataagcactatatttctatttttattaatggacgatacattaaaaactttatgttaaataaagcgattttagaaggctaccatacactcttaacaataggtaggttcccgatttgttatattaatattgaaatggatccgatcttagtagacgtaaatgttcatccaacaaaactagaagtgcgtttatcaaaagaagagcaactataccaattgattgtgagcaaaatacaagaagcatttaaagaccgtatattaattcctaaaaataacttggattatgtgccgaaaaaaaataaagtattacattcattcgaacaacaaaaaatcgaatttgaacaaagacaaagcacagagaataaccaagagaagatgttttcatctgaagaaagtaacagtaagccatttatggaagaaaatcaaaacgatgagatagttataaaagaagattcatataatccattcgtaacgaaaacatctgaaagtttaatagctgatgatgaatcttctggttataataatacacgtgaaaaagatgaagactacttcaaaaaacaacaagaaattttacaagaaatggatcaaacatttgattcaaatgatgatacaactgtgcaaaattatgagaataaagcgtctgatgattattatgatgtaaacgatattaaaggaacaaaaagtaaagaccctaaacgaagaattccatatatggaaattgttggacaagtacatggaacgtatattattgctcaaaatgaatttggcatgtacatgattgaccagcatgcagctcaagaaagaataaaatatgaatattttcgagataaaataggtgaggttaccaatgaagtacaagatttattaatcccgttaacatttcatttttcaaaagatgaacaattagtcattgatcaatataaaaatgagcttcaacaagtaggtatcatgttagaacattttggtggtcatgattatattgtaagtagctatccagtttggttccctaaagatgaagtagaagaaattattaaagatatgattgagctaattttggaagagaaaaaagtagatatcaaaaaattacgtgaagatgtagcaatcatgatgtcatgtaaaaaatccattaaagcgaatcattatttacaaaaacatgaaatgtctgatttaattgatcaattaagagaagcggaagatccatttacatgtccacatggtcgtccaataatcattaatttttcaaaatacgaattagaaaaattatttaagcgtgtgatgtagagaggatgaatcaagtgaataacaacatattgcctgctataagaaacattaaagatttagagaaactgattaaaacagattataaaatgtgtgtgcttctagatatgcatataggacatataaaaagtattatggaattgctgaagcaaaatcatatagagtgttttattcatatagatttgataaaaggtttaagccacgatgaatttgcaagtgaatttattattcagcaatacaagccaaaaggtattgtatcgactaaatctaaagtaataaaaaaagcgaaatcattaaatactttaacgatttttagagtatttattattgatagtcaagcattgaaacgcagtatagatttgataaaaaaagttgaacctgattttgttgaagtacttccaggtgttgcgagtaaagcgattcatcatattcagaaagaaacaaacacacaagtcattgcaggtggcctaattaacacaataggtgaagttaatgaagctgttaaaaatggagcgaaatatgtaacaactagttatgataaactctggtgaatcataagtctgcaaaaattagatttttcactagatttagtcatataacatattaaaaaagtcgttttcatatgggatatgcagtaggtatatcatacaaagaataattaaataacataattagcacctctaaaacgattaaaatcattaaagttttagaggtgtttattagtaaaaaatgcaactagtcataaaaaatatggctgaagaatgtcaattaaacataatggcgtcataaataaattagtgcggattgatatttctagttttcaaattaaactacttttataaagacttgaaaaattaaatttgacaaaatttttacaaaaaccattgacaacgctttcatatcgatagtatcataacaaatataataaaagttaatacatagaatagagacgggagatttctacgagccaaactgctagtgtaggaatctctttgtctttttgggaggacatttaatatgaatgtatatttagcagaattcctaggaactgcaatcttaatcctttttggtggtggcgtttgtgccaatgtcaatttaaagagaagtgctgcgaatggtgctgattggattgtcatcacagctggatggggattagcggttacaatgggtgtgtttgctgtcggtcaattctcaggtgcacatttaaacccagcggtgtctttagctcttgcattagacggaagttttgattggtcattagttcctggttatattgttgctcaaatgttaggtgcaattgtcggagcaacaattgtatggttaatgtacttgccacattggaaagcgacagaagaagctggcgcgaaattaggtgttttctctacagcaccggctattaagaattactttgccaactttttaagtgagattatcggaacaatggcattaactttaggtattttatttatcggtgtaaacaaaattgccgatggtttaaatcctttaattgtcggagcattaattgttgcaatcggattaagtttaggcggtgctactggttatgcaatcaacccagcacgtgatttaggtccgagaattgcacatgcgattttaccaatagctggtaaaggtggttcaaattggtcatatgcaatcgttcctatcttaggaccaattgccggtggtttattaggtgcagtggtatacgctgtattttataaacatacatttaatattggttgtgcaattgcaattgttgtagttattattactttgattttaggttacattttaaataaatcatcaaaaaaaggtgatatcgaatcaatttactaaaataaaaagaaacgtaaatagcataatttaacatgtttgattcatggattatgctattttttcgccaaaatttaacagattttgtacaatgggttagcgattattttttaataaaggagatactactaatggaaaaatatattttatctatagaccaaggaacaacaagctcaagagcgattttattcaatcaaaaaggggaaattgcaggggtagcacaacgtgagtttaagcaatattttccacaatcaggttgggttgaacatgatgcaaatgaaatttggacatctgtgttagctgtaatgacggaagtaattaatgaaaatgatgttagagctgatcaaattgcaggaatcggtattacaaaccaacgtgaaacaacggttgtttgggacaaacatactggccgcccaatttatcacgcaattgtttggcaatcacgtcaaacacaatcaatttgttcagagttaaaacaacaaggatatgaacaaacatttagagataagacaggattacttttagatccgtattttgcaggtacaaaagttaaatggattctagacaatgttgaaggtgcacgagaaaaagcagaaaatggcgatctattatttggaacgattgatacttggttagtatggaagttatcaggaaaagctgcgcatattactgattattcaaatgcgagtcgtacattaatgtttaatatccatgatttagaatgggacgatgagttattagaactacttacagtacctaaaaatatgttgccagaagttaaagcttcgagtgaagtatatggtaagacaattgattaccacttctatggtcaagaagtaccaatcgctggagtagctggtgatcaacaagcagcattatttggacaagcttgcttcgaacgtggtgacgtgaaaaacacatatggaactggtggcttcatgttaatgaatacaggtgacaaagcggttaaatctgaaagtggtttattaacaacaattgcttatggtattgatggaaaagtaaattatgcgcttgaaggttccatctttgtttcgggttcagcaatccaatggttacgtgatggattaagaatgattaattcagcaccacaatcagaaagttatgcgacacgagttgactctactgagggtgtttatgttgttccagcttttgtaggtttaggaacaccatattgggattctgaagcacgtggtgcgattttcggtttaacacgtggaactgaaaaagagcactttatccgtgcaactttagaatcactatgttaccaaactcgtgacgttatggaagcaatgtcaaaagactctggtattgatgtccaaagtttacgtgtcgatggtggtgcagttaaaaataactttattatgcagttccaagcagacattgttaatacttctgttgaaagacctgaaattcaagaaactacagctttaggtgctgcatttttagcaggtttagcagttggattctgggagagtaaagatgatatcgctaaaaactggaaattagaagaaaaattcgatccgaaaatggatgaaggcgaaagagaaaaattatatagaggttggaaaaaagctgttgaagcaacacaagtttttaaaacagaataaacttgtagattagacttttgtataaacattgtgatacaatcaatttaagttaatatttgaatcgagaagcgagagatttgttcgaacatgtacaattgaaggattgtttatgtgggacaagtctctcgtttttacatttttttaggaggcgttttggaatggcattgtctacttttaagagagaacatattaaaaagaatttaagaaatgatgaatatgatttagtaattattggtggcggtattacaggtgcaggtattgcactagacgcgagtgaaagaggaatgaaagttgcattagttgaaatgcaagactttgcacaaggaacaagctcaagatctacaaaattagtccatggtggtttgcgttacttaaaacaattccaaattggagtagttgccgaaactggtaaagaacgtgcgattgtttatgaaaatgggcctcatgttacgactccagagtggatgcttttaccaatgcataaaggtggaacatttggtaaattctcaacatcaattggtttaggaatgtatgatcgtttagcaggtgttaagaagtctgaacgtaaaaaaatgttatctaaaaaagaaactttagctaaagaaccattagttaaaaaagaaggtctaaaaggcggcggttactatgttgaatatcgtactgacgatgcgcgtttaactattgaagttatgaagcgtgctgctgaaaaaggcgcagaaattatcaactatactaaatctgaacacttcacttatgataaaaatcaacaagtaaatggtgttaaagttatagataaattaactaatgaaaattatacaattaaggctaaaaaagtggttaatgcagcaggtccatgggttgatgatgttagaagtggtgattatgcacgcaataataaaaaattacgtttaactaaaggtgtacatgttgttattgatcaatcaaaattcccattaggtcaagcagtatactttgatactgaaaaagatggaagaatgatttttgcaattccacgtgaaggaaaagcgtatgtaggtactacagatacattctatgacaatatcaaatcttcaccattaactacacaagaagacagagactatttaatcgatgcgattaattacatgttccctagtgttaatgttacagatgaagatattgaatcaacatgggcaggaattagaccattaatttacgaagaaggcaaagacccttctgaaatctctcgtaaggatgaaatttgggaaggtaaatcaggtttattaactattgcaggtggtaaattaacaggctatcgtcacatggctcaagacattgttgatttagtatctaaacgcttgaaaaaagactacggtttaacatttagtccatgtaatacaaaaggtctggcaatttcaggtggcgatgtaggtggtagcaagaactttgatgcgtttgtagagcaaaaagtagatgtagctaaaggattcggcattgatgaagatgttgcaagacgtttagcatctaaatatggttcaaatgttgatgaattgttcaacattgcgcaaacatctcaataccatgatagcaagttaccattagaaatttatgtagaacttgtttatagtattcaacaagaaatggtatacaaacctaacgatttcttagttcgtcgttctggtaaaatgtatttcaatataaaagatgtattagattataaagatgctgtcatcgatattatggcagatatgcttgattactctccagctcaaattgaagcatatactgaagaagttgagcaagcaattaaagaagcgcaacatggaaataatcaaccagcagttaaagaataattaatttgtacaatcataaactggtgtcctgttttaagggcatcagtttttttatacgagatacattagtcaattgaaactatgcatcactaaatgtatgataataataaaagcgaatataaaagcgttgttattaaaggtgtgagatgatgactgaaaaacaatttaaattaactgtacaagataatacgaatattgaagttaaagtgaattttacagatgtagattcaaaaggaattattcatatatttcatggtatggctgaacatatggaacgttacgataaattagcacatgcactttcaaagcatggcttcgatgtgatacgtcataatcatcgaggacatggtattaatattgatgaatcaacaagagggcattacgatgatatgaaacgagttatcggtgatgcctttgaagtagcgcaaacagtgagaggcaatgttgataaaccatacattataatcggacattcaatgggatccgttatagctagattgtttgtagaaacatatccgcaatatgttgatggtctaattttaagtggtactggtatgtattcattatggaaaggtttaccaaccgttaaagtgttacaactgattacaaaaatttatggtgctgagaaacgagttgaatgggttaaccagttagtatcaaatagttttaataaaaaaatacgtccattacgtacacaaagtgattggatttctagtaatccaattgaagtagataactttattaaagatccatatagtggatttaatgtgtcaaatcaattattatatcaaacagcctattatatgctacatacatcacaattaaaaaatatgaaaatgttaaatcatgccatgcctatattattagtttcaggatatgacgatcctttaggtgattatggtaaagggattttaaaattggcgaatatatatagaaaagctggcattaaaaatgttaaagtgaatctttatcatcataaacgtcatgaagtgttatttgaaaaagatcatgacaaaatttgggaagacttgtttaaatggttgaatcaattttataaaaaataaagaaagtggaattaaatatgaataaaaataagccttttattgtagtaattgtggggccaactgcttcaggtaaaacagagcttagcatagaactcgcgaagcgtatcaatggtgaaatcataagcggtgattctatgcaagtttacaaacatatgaatattggaactgcaaaagtaacacctgaagaaatggatggtattccacatcatttaattgatatcttgaatcctgatgatacattttcagcatatgaattcaagcgattagcagaagatttaattactgatataacgaatagaggtaaagttccaatcatagcaggtggaacaggcttatatattcaatcattaatatataattatgaattagaagatgaaacagttacacctgcacaattatccatagttaaacaaaagttatctgcattagaacatttagataatcagcaactacacgattatttagctcaatttgatgcggtttctgcagaaaatattcaccctaacaaccgccaaagagtgttgcgcgctattgaatattatttaaaaacaaaaaaacttttgagtaatcgcaagaaagtgcaacaatttactgaaaattatgatacattattattagggattgaaatgtcgcgtaaaacattatattcaagaataaataaacgtgttgatattatgttggatcacggattatttagagaagtgcaacaacttgttgaacaaggctatgaatcttgccaaagtatgcaagctattggatataaagaattaatacctgtgattaacggacaaatgatttatgaagatgctgtcaatgatttaaagcaacattcacgccaatatgcaaaacgacaaatgacatggttcaagaataaaatgagtgttcattggttagataaagaaaatatgtcacttcaaatgatgttagatgagattacaacccagattaagtaaaaggagtccgacagatgattgcaaacgaaaacatccaagacaaagcactagagaattttaaagcaaaccaaactgaagtaactgtattctttctaaacggtttccaaatgaaaggtgttattgaagaatacgacaagtatgtcgtaagcttaaattctcaaggcaaacaacacttgatttacaaacatgcgatcagcacttatacagtagaaactgaaggtcaagcatctactgaaagtgaagaataagttgtaatcatatgggcacgatttaatgactcgtgtacataacgtttgaagtatgataaatagatatagaaataaagtcatatgtgacatcaattaaatgatgttcaaatgacaagatacaatagaggaatgtttgtaataaaaacgcttcatataaaggtcaagtcaatatatgatacgactttatatgaagcgttttatttgctatgagctagtatattttataataatttttctatttctctttcgatttgaacaggttttttttgaggtgcaaatcgtttaacaacgttaccttcgcgatccactaaaaacttagtgaaattccatttgattttctcattaaagaatccgtgttgtgccgcagtcaaatatctaaataaaggtaattgatgttccccttttacgtctattttttgatgcatagggaaggtaacaccatagtttaatttacagttttgagctgcttcttcgcctgaaccaggttcttggccaccaaattgattacaagggaaacctagaattacaaacccttgatctttgtatttctcgtataatgattgcaaaccttcaaattgtgaagtaaagccacattcgctagctgtattaacaattagcataacgtcacccttatatgcatctaatttgtaagtaacacctttatttgtttctactacaaaatcataaattgtctccattgtatcatcctttcgatttacttaaaatgtaccacaaaatcgtgtaatagtctttactaaaactctatgatagaatactttgagtaggattttattaaggagatgtataacatggctcagcaacaaattcatgatactaaaaataaactagaaaaagctgtcttagtcggtgtacatgctcaagatgataagcaatttaattttgagtctacaatggaggaattatcatctttatcagagacttgccaacttgaagtgttgggtcaaattactcaaaacagagatcgtgtagatcgcaaatattatgttggtaaaggtaaaattgaagaaattcaagcatttattgagttcaaagatattgatgtagtcatcacaaatgatgaattaacgactgcacaatccaaatcactaaatgaagctttaggtgtaaaaattattgatagaactcagttgattcttgaaatatttgcattaagagcaagaagtaaagaaggtaaattgcaagtagagctagcacaacttgattatttattacctagattgcaaggccatggtaaaagtctttctcgtttaggtggcggtattggaactagaggccctggtgaaacgaagttagagatggatcgcagacatattcgaactcgtatgaatgaaattaaacatcaattgcggacggtagaagaacatcgcgaaagatatcgaaataaaagaaatcaaaatcaggtgtttcaagtagctttagttggttatacaaatgctggtaaatcatcatggtttaatgttttagcaaatgaagagacatatgaaaaagatcaattatttgcaacgttagatcctaaaacacgacaaattcaaataaatgatggatttaatttaattatttcagatactgttggttttatacagaaactacctacgacgttaattgcagcttttaaatcaactttagaagaggctaaaggtgcagatttattagtacatgtcgtagatagtagccatcctgaataccgtacgcagtatgacacagttaatgatttaatcaaacaattagatatgagtcatatttctcaaatagttatttttaataaaaaggacttatgtgatcatgcatcaaattgtccagcaagtgatttgcctaatgtttttgtttcttctaaaaatgatggtgataaattacttgttaagacgttatttattgatgaaatcaaaaggcaattaacttattatgatgagacaattgcgacgaataatgcagatcgattatattttctaaaacaacatacattagtgactgaacttaaatatgatgaaattgaaaatgtttatcgtataaaaggatttaaaaaataataaaaggacgaaattcaaatgaaagatataagtaagatagtagctgacgtcgaatcaacgttagcaccatattttaaagaaattgaagaaacagcatatattaatcaagaaaaagtattaaatgcgtttcatcatgtcaaagcaaccgaaagtgatttacaaggatcaacaggttacgggtatgatgactttggacgtgatcatttagaagaaatatatgcgcaggcatttaaagcagaagatgcaattgttcgtccgcaaattatttcaggtacgcatgcgattactattgcattacaaagtttattaaaacatggtgatgaattaatttatataacgggaagcccatatgacactttacttgaagtcattggtgtaaacggaaatggtattgaaagtttaatggagcacggtgtatcgtataaagatattgcacttaaagaaggtaagatcgatattgaaagtgtgttagatggggtttctgagcgtaccaaagtaatagcgattcaacgttcgaaaggctatgatcaaagaccttcaattcctctagatgaaattgaacaggtgattactaggttgaaagaagtgcatcctaatattttaatatttgtggataactgttatggggaatttgttgaaagacgtgaacctatagaatgtggtgccgatttaatagcaggatcattaattaaaaaccctggcggtggtttagctaagattggtggatacattgctggtagaaaagatttaattgaacgatgtggttatagattgacagcacctggtattggtaaagaagcaggtgcatcattaaatgcattgcttgaaatgtatcaaggtttctttttagcaccacatgttgtcagtcagagtcttaaaggggcattgtttactagtttatttttagaaaaaatgaatatgaacacaacgccgaagtactacgaaaaacgaactgatttaattcaaacagttaaatttaaaacgaaagaacaaatgatttcattttgtcaaagtattcaacacgcatccccaattaatgcacattttagtccagaaccgagttatatgcctggttacgaagatgatgttattatggctgctggtacgtttattcaaggttcatcgattgaattatctgcagatggacctattcgtcctccttatgaagcatatgttcaaggaggattaacatatgaacacgttaaaattgctgtgacaagagctgttaatcagttgaaagaacaaggacttatataatagattaaatttcaccctaaatgataatgtgttttgggtgaaatttttttgcggagatttatcagattatttttaaaaattgaaaaaatattttagctgtagattgttttatggcgttttaaaggtcaaaattgcagttatatcaatgttttgagctttatgtcagaaaacctgacatatttttgaaatcctaaaaaaattatgataagttattaacaagttcaaaagtagaggagaggaacaatgatatcgaatgatgcaatcagacgaaatatggctgtcttctctatgagtgtagtaagtaagttaacggatttaacgccaaggcaaatacgttactatgaaacacatgaactcatcaaacctgaaagaacagaaggtcaaaaacgtctgttctcactcaatgatttggaaagattactagaaattaaatcattattagaaaaaggatttaatatcaaagggattaaacaaatcatttatgactcacaagagcatttaacaacagatgaacaagagataagaaaaaagatgattgtagatgccacgcaaaagcctattggagaaactttgccaataaatcgtggtgatttatcccgatttattaaataaaatttggaggattttaaaatgccaaaacgtactttcactaaagacgacattcgtaaatttgcagaagaggaaaatgtaagatatttaagattacaattcactgatattttaggaacaattaaaaatgttgaagtgcctgtaagccaattagaaaaagtacttgataacgaaatgatgtttgacggttcttctatcgaaggtttcgtacgtatcgaagaatcagatatgtacttacatccagatttagatacttgggtaatcttcccatggactgctggacaaggtaaagttgcacgtttaatttgtgatgtatataaaacagatggaacaccatttgaaggggatcctcgtgcaaacttaaaacgtgtattaaaagaaatggaagatttaggcttcacagactttaacctagggcctgaaccagaattcttcttgtttaagttggatgaaaaaggggaaccaactttagaacttaatgatgatggtggatatttcgatttagcacctacagatttaggtgaaaactgtcgtcgtgatattgttttagaattagaggatatgggcttcgatattgaagctagtcaccatgaagttgcccctggtcaacatgaaattgactttaaatatgcagatgctgttacagcatgtgataatatccaaacatttaaattggttgttaaaacaatcgcacgtaaacataatttacacgcaacatttatgcctaaaccattattcggtgtgaatggtagcggtatgcactttaacgtttcattattcaaaggtaaagaaaatgcattctttgatccaaatactgaaatgggcttaacggaaactgcatatcaatttacagcaggtgtgcttaaaaatgcacgcggatttactgctgtatgtaacccgttagtaaactcatataaacgtttagtacctggttatgaagcaccatgttatattgcatggagtggtaaaaaccgttcaccattaatccgtgtaccatcttcaagaggattatctactcgtatcgaagtacgttcagtagatccagctgcaaacccatacatggcgttagctgcaatcttagaagctggactagatggtattaaaaataaattaaaagttccagaaccagttaaccaaaatatttacgaaatgaaccgtgaagaacgtgaagcagtaggcattcaagacttaccttcaacactttatactgcattaaaagcaatgcgtgaaaatgaagttattaaaaaagctttaggaaatcatatctataatcaatttattaattcaaaatcaattgaatgggattactacagaactcaagtatctgaatgggaaagagatcagtacatgaagcaatattaatacgctaaacaatgatgggaaatcagtaatatcaagggctagagcgttttgctttagctcttttttgatttggaaagatgggatttcacttgaccacttttgttaaaaaatggatttggtcaagttttgggcaacttttggtcaagtaaatgttttgtgtatttatttttttaaagctggggaagaccattttatattttagttcacatgaattttaatatatttggaggtgatgagatgaggcgataaaagaacgtcgcgaaaacgttgagtattacttgaaaatagccatattcatattacttctcatcgaattcatttgcagaacgttctaaggtaagaccccgaaaagagggaccttactactcattattaagggggtaatactatatgaaaagagaaacaaaacaaaaaatatctttttgtttatcgatcggtattttcattttagttatactactattgatattctaaaaaattaaaaatttcgcctcatctaatttatgaattgctatgatgaaatattcaatacaatcaaagaattgatagaaaacaaagagatatcgagttatcaaattaataaagatactgggataagttacggtaatattaatgctatgagccgtggagaaagaagaatagaaaatttaagcttaaagaatgcaaagatcttatatgaatatgcgaaaaaggtattgtaatataagcattgagttcaataggcatacaataactgcccaaactagtgactgagtgggtgtttttatagtattaaaagttttctaaaagtgaaagaaatcatgtttagtgatttacttatgttttttaaaatagtataataattttatataaaatatagaacttcagtataccttttgagtatatatggagttctttcttttttacaagatgtatatgtataaatggaaatgtttattacattacataaaaacctttaggtgctcttagatggatgttaatcataaaacaaagtgattttgaaaaatataggttattataatttacaattgcaaattataaatcttgacattggatatgggaactcaaacatatcacttacaccaatttgtggaatgttaaataactataaagaggaaaggagaaaaaatgataagaatggttaaagaaaaagaacgaatagcaaaattaaatttcgaatagctgtgacgagcttaataattcaagtacttaattttatcaaatcgttcttttaaaaaggtaaagggcaaaagacctttaccacattaaatagggaggtggtatttatgacaagagaattaaggaaaaaattaactctctatcttaacattgcaactttaatattatttattattaatttaactagaaaaaaataaattattctttcattttgacaaaaattatgaaccagtttaaagaaatttataatacaatagaaaaattactaaatgataaatcaatatctaattatagaattaatcaagacactgatgtttcttatggtggtataagtgaattaagaagcgggaaaagaaaagtgaataatttaactttagaaacagcggaaaaactctataattaccaaaaacaattagaaataatgattgaagattaaaataaggccatatttttgaaatatcatggagtgagccttttaagtcatctaattttaaagtatattaaatatggataacttaatgtgaatataaataaaaaattatcaaataatataatatagaatagatggagacaagaaattttatcaatatataaaaaaacgccaatactattaggtattagtttatgaattaactagtttggcaactacaaagaaacaatgtattgctaaacgtagttactgcattaggattattataattataaatagaaagagagtgtgattaataatgaatgagattgaaactattataagtgaaatagaaaagttattaactaacaatacaccatatagtatttcaaaaaactcaggtgtaccacgtcaaacagttactgatttaaaggtaggtaaaactaaaataaaagaagctaaatttaaaacgataatcaagttatatgaatatcaaagaacattagaaaataaaacagaatgttaacaaaaatattttgttaggttaggtggacaagaaattaaatttctaatgatttcatggttgtctgtccacgttttgtccacctcaataagataatctcttagttttagaaattgtacatggttaaataatcaaaaatgcatattatgaaattatcattgccattaaatcttgaatgatctttaagcgatgatataaaaggctgaacacagtaaataagttaactttaatgcagtattctatactatacatattttgtaataatgtttatgcacataatttttcattgacaattttttatattaaattgtgtaattggcatatatgatgatttgtgataattatattgtaatatagcatttggttttatgattctaaaattaatagatttgaaaagtatactttatttcatgaaagtttttggtacatttatttgaaaatgtttttattacaaagttacatggctaaatgtttcttaacaaaattaatttttcgagtgtaaagaatcgtgtggtaaacataatttatatagattataaggaggtgaaaatggtcgaggaagttaaaacgataaaatagtttgaatgttttgatttcaattctgataggactattgaatttgcaaactaataagaatgtgagatttgatttaatacgaagtcatattctttgaataaaatattactttctcaccattagtaaaatgaagatgactattaaagtgcgaaaaacaaataaaaaagagaaaatagaatttttaatagggacgtttataattattttagtaatattagggttcaaaattatgaaataaatgtatagtatttgagaagtctatatgactccggaaaaattaaattctaaagatatctcaatatctcaaatttaatagactactggagttagtagtttgaatattgaaagacactaatctaataaaaatacataaaaggttaaactttagaagtggctgtaaacttcaatgaatactaaacattgaagttttgtaaaaggcgtaaggtatacaagacaaatcgtttatctttgacaaagtaattgatgatgaaaagtcgttaatatgtagaaacaaaaattgaaaatataaaatttaactattatgaagtgatgatagccattaatgaatagaaaaataataaaatcatttatagataaaaaatacgttaagttcacagaatttcgaaaaaaagcagaaaacattgtacagatatggagatgaaaaaatgtcagaatacaagaaaaagataattgaattaattgaaagtaatttaacaggatatgaaatttctaaaaaaactggagtttctcaatatgtactttcacaattaagacagggcaaacgcgaagtagataatctaaccctgaatacaacagaaaaattatatgaatatgccaataaagttttgtaatataactactgtataaattaatcaagctatgtttatttgatttaactattaataaaaatcatatggtaaatggatattataatgattaaaatacaaaaatagtagattccaatttgtgaaaaaggagtatgtcgtttcatttagaatttattgcactaaattagcatcgaataagggaaaatgagtgttaagttttaaatgataaaatagattggaatggatcgtcttgaaatgctcccttcaaagttttcattttttcaatgtctacttcgaaggggcatttccattatattgttatagctttttatatttgtataatgaacatataagtttaagaagatgagagtgaaggaaataaaaaagctcaaatgtaccaaattgttaatcttaataaatctctactttataaagattgaatggacattcgagcgttaatcagtcaggagggaatttcactcctacaatttaataataatacttgcttcaccactgtacaaggagtgatttgttatgttcaaagtgaattattcgattttaagttattatccagaatataatatcgcagtaagttggcaacgtttaagagaaggaaaaacaataaaaaacaagatttaatactgctgcgtcatgaggcgcttgaacattatttgatgaataagtataatttcaactatgattatgcacataaaattgtatcaaaaaaatacgattattcaatttttataaaaaagaaggtggattaaatgcttacattaataaaattgaaagaagatgaacaggttataatatatgaatatatacctgaagatgatataagtaacggtaaaggttcagtaacttttaataaaaaagatgcagaggttatagatttctcattatctgaaatagaaaatgaagaatattttatgttatatcgtaataagtctttttctgtagtaagagactttatcgagaagcaagaatttcccgaaaattataaaatagcatggtattaatgcatcctttctagacagataaagagaaagtggtgctatttttatatgcttttttaactatttactgaaatagcagaatcacaaaagttaagatatttaaaagaacttggtgaagatggcgaatataaatatgttgccaaaatagatagtaaaacgtctaaactatgtcattcgctcaacggcaaagtatttaaagttaaagatatgataccaggtgtgaatgcgccacctatgcatccttggtgtagaagtaccacagtgccacatgttggcaattggtgagacaagttctttaaagagcgtgaaggtaaatatcaagtagaagatgacacaaccaaagatgaattacaacaagctaaagtattaggaaagaaaatatatattactgatcaagcaattgataaagtcagatatgttgatattccaacacataccaaagaagaaaatcaatttatacaagaacaacataaagccttgcttaaagatgccaaagaaaacaatgatagcaatgaagtagcttatttattaaaagatggtaaagttacaaaagtatatggtgatcaagatagtgtatcttttgcaccaggggaaaaagcaacagaattgttatttaacagtaaaccgaattcaattgttatgttacataaccatcctgggcagtctagtttttctcttacagacttgtatttatttatatttaataattctattaaaacactgacaattgttacaaataaaggtcaaacaaagtacttaactaagacaaaagaatattgcaaatcaacttgtattgattgtattaaaaaatataataaaaataagaatataaaaaaattcaatcataaggatattgatatgattctaaagagattatataatagtggtaacataatatataaagttagatgattaaaatgtattttgcacagttagatggtgaaataactaataaacagtcacaagaattattggataaagaatacaagaaagcaatagaattagaaaataagaataaagaacaaaaattagaaaaatagcatcctttctacacagataaagagaaagtggtgctatttttatacacttttttaaccttccaatgtgaaggttattttttattgtccaaaacgtgctgatgacattttaaaagcaagtatggaatatcagtcgacagactataaacggaggtatgtctcatggagataaatgaaagtaatattactgacgtaactcagaacgaagagcaactagacaacagtgatgaacaatcacaacagaatgagaaaacattttctcaagaagaagtatcacaattgattaaagagcgtatagctagagaacgcaaaaaatcagatgaacgtattaaagatgcggttcaagaagctgagaagttagctaaaatgaagtagcttatttattaaaaggtgctaaagttacaaaagtatatggcgatcaagatagtgtatcttttgtgccagggtaacaagcaaccgaattattatttaacagtaaaccgaattcaattgttatgttacataaccatcctggacaatcaggattttcattgaatgacttaaagatgtttattgaaaataaatccatccgaacattgactattgttactaactatagtgtagtaaaatatataagtaaaacttcattatataatcagtctcaagtttataaaataatgaaagatataaaacaatctataactatgagaaataatgaagcgatagttgataatattctaaagcaactttataataaaagatatataaaacgaaaggacaaataggagtaatacattatgtcaattcaacaattagatggttacatttctatagaagatttttttaagcatatggatgaattatcgaagaaagaagaattagaaaaagaaattaatcaatcaaagtctaaatatcaatagcatcctttctacacagataaagagaaggtggtgctatttttatacgcttttttaactatttactgaaaatgcagaatcacaaaagttaacatatttaaaagaacttggtgaagatggcgaatataaatatgttgccaaaatagatagtaaaacatctaaattatgtcattcactcaacggaaaaatatttaaagttaaagatatgataccaggtgtgaatgcgccacctatgcatccttagtgtagaagtaccacagtgccacatgttggcagttggcgagacaagttctttaaagagcgtgaaggtaaatatcaggtagaagtaaaagaagctaaattacaagaaaaagctaaaaaccagatgaaagaaatgattgaaagttgtaaaatgaaaatagaaataaattgtgaaaaacaaaatggacatatgttaggtcatcatctatataatgaaaataaaaaaagagccattttaaataataagaaattgcctagctatacaatactttctatagatttattgaatgaattgttaagagaaaaaatgtcaacaggcaatctaatattaagtgatgagctatttgatatgaaagagattattaattttaatcaaattattggaaaagtacatatcgataatgtgtatattgaaaccagaaaaggaaaagtgcattattcgaagacaggtgctcatatagtaccttatattgataagtaggtgaaaagtattgagaattgaagatgcatatcgtaaagatgttattatcacgcttttgaataatgaagaatacgaagggtttgtaactgactatgaaaatgaatttgagagtgaaacaggaaatcttgttgtagatatacagactgattttgctgtttattcgtttgatgaaactgagataaaaagtattagattattaaaataatttctaaatagcatcctttctacacagataaagataaagtgatgccattttttgcgcttttataacaactaaggatacaagacacataccttcaacaaaatcttcatctaaacctatcgatttcctaagttcaattttaaacacaaagtttatttgtaaagatgcacacctataaaaatcttaatcatcgaaatgtcacaaacatctccatattaaaaacttaaatagtgcattccatttaaactaaacatcgatattcctaccaaaatagatttagtaattcaaatgatattacatcactttcataaaataactacaaccatcataatacttttcaaatctcgtcaaattaaagtaaatacagcacaaattaacatttttaaatatataaaataaaacaagatactcaataatctgtagtatcttgttttggaatgatgtaattttataacatcaacggcttcaaatgagtagtttcatatataaatcaataaacacaactactcaactgaactggcttaattaataaatgatttgccagacgaaatataacagcattattagattaattctaatagtttatttaaattttcttcggttgtcgcccagctggttgcgaatctaacaacacgatgttgatcatcgtatttttcccaaacagcaaatttaactttttgttctaactctgctattttctcgttacttaaaataaaaaattgttgattggttggagaatcaaagtaaagacgatagcctttatttataaacccgtctttcatcttatttgccatttcgatagcatgtctgcttatattaaaatataaattatccgtaaataattctaaaaattgtatgcctgttaaccgtccttttgctaaaagtgcaccgtgatgtttgattcgagtggtaaattgtttcggttcattattcttcgtaaaaacaattgcttctccgcataatgcacctatcttcgtaccacctatataaaatacatcacaatatttagcgatgtctttaatagtcatatctgattgatcactcatcaatccataccctaatcgtgcaccatccataaataatggaagctgatattgcttacatactttgcataactcttccaattctgatttagagtataatgtgccatattctgtaggatgagaaatatataccattcctgggaataccatatggtcctttttaaaatcacttttaaatgtctccatgtaagtttcaacatctgaagcactaacttttccttccttagagggtatagtaattactttatgtccactatattcaattgcaccgccctcatgcacagcaacatgaccagtgtctgctgaaataaccccttcgtaactttctaacattgaattaataacaacctgattggtttgcgttccacctactaaaaaacggatagtagcatttggacaatcaattgtatctttaatcttttcaattgcctgagctgtgaattgatcaaagccatatcccgaagcttgtacaagatttgtatctactaatcgttttaatactttttcatgagcaccttctaaataatcattttcaaatgagatcactacatttccccctaaaactaatatcagcattttaataagataaactaatttcaaaactagttcgatatttaaaatgtattgtgaattgttaaagtttgtatcgcattatcgcgaagttgaataaatatattatacatcaaacaatacattaataaaattaattaatttttaatcatagcgacttttcatgctggaacacatatattaatgattgaattttactgttaaaagttctatgatttaggaaatagagaaaagaggggatttaaatggaacaaattaaacttaaaacttttacagctgagactttagagttattagaaaaaaacattaatgcttttttaagttctgaagaagctacaaatttaaaattagtaaatattactattaaagaaatagaagaaagaacattcccaaataatgaagaagaattcaatgcaattttaactttatctgtgaataaataatatgatgtgaaaggtgcaaaatgttttttgtgcctttctttataggagaaaagactatgcgatatacattttcaaatgatttaggaacactttttaccattattttagccattggattcatcattaatttagtattggcttttattattatctttttagaaagaaatagacgtacagcgagttcaacttgggcatggctatttgtactttttgtcttaccattgattggttttattctttacttgttttttggtagaaccgtttcggcacgtaaattgaataaaaacaatggtaacgtgttaacggatttcgatggacttttaaaacaacaaatagaaagctttgataaaggtaattatggtactgataacaaacaagttcaaaaacatcatgatttagtacgtatgcttttgatggatcaagatggttttttaactgaaaataataaagttgatcatttcattgatggaaatgatttatatgatcaagttttacaagatattaaaaatgctaaagaatacatccatttagagtattatacattcgctctagatggcttgggccaaagaattttaaaagcgttagaagagaaattgaaacaaggtctagaagtgaaaattttatatgatgacgttggttcaaagaaagttaagatggctaattttgatcattttaaatcgttaggtggagaagttgaagcattttttgcttctaaattaccgttattgaatttcagaatgaataacagaaatcatagaaaaatcatcgtaatcgatggtcaactaggttatgtcggaggatttaacattggtgatgaatatctaggattaggtaaactagggtattggagagatacgcatttacgtatacaaggggatgcggttgatgcactgcagttgcgatttattttagactggaattcgcaagcgcaccgtccacagtttgaatatgatgttaagtatttccctaaaaagaacggaccattgggcaattcaccaattcaaatagctgcaagtggtccggctagtgactggcatcaaattgaatatggttatacaaaaatgattatgagcgctaagaagtcggtatatttgcaatcgccttatttcattccggataactcatatataaatgccattaaaattgcagctaaatcaggggtagatgttcatctaatgattccatgtaagccagatcatcctttagtttattgggcgacatattcaaatgcttcagatttactatctagtggcgtaaaaatttacacgtatgaaaatggatttatacattctaaaatgtgtttaatagatgatgaaatggtttcagtcggaactgctaatatggactttagaagttttgaattgaatttcgaagtcaatgcttttgtatatgatgaaaagcttgctaaagatttaagggtggcttatgaacatgatattacaaaatcaaaacaactaaccaaagaatcatatgccaatagaccgctgtctgttaagtttaaagaatcgttagctaaattagtttcgccaattttataatttatttgtaaggagtctcgattatagaggctctttttattttgcccaaaattaaaataacgataaatatattatgtgaacctaataatgacatttgtcatttcaaatctatgacaaagtgttctattttaaatctaataaatttactaatattaaattaaggaaaaaatagaggtgattaaattgattcaaatatctaatatcaacaagtcatttaataaaagatgtgttctaaaaaatatttcgttcgatattgaacaaggtaaatgtatcgctttaattggaaaaaatggtgctggaaagtcaacgttaattgatatattaattggtaatgttaatgctaattctggtgagatatttgataaagacaagttattacaaagtgaaaatcgcagtataatgttccaaaaaacgatgtttccagatcaattaaaagttattgagattatcaacttatatcaatcattttacgaaaatccattaccattggaagaaataatagaactgacgaaatttgattctagtcaactgaaccaatttgtaaataaactttctggtggtcaacaacgattactcgattttgtattatctttaatcggacaaccacaattgatcttattagatgaaccaacatcgactatggatatagaaattagagaatatttttggtcaattattgaaaatttaaaagaagataatcgaacgatactctatacatcgcactatattgaagaagtcgaacgtatgtcagacaaaattattctcattgaaaatggagaaataatacttaatgattcaacgtcacatattagaaccaatcagcaatctcagattacgttatccgatgaatatataagaaagttaaaactagataaagatgatttagttattcaaaaaaatcataatggcactatcaaaattattacttcaaatgtaaatgatacgattttatatcttcaacaacttcatattaatttggatgatattgaaatacaaaaagtctcaattgttgattcatacttcaacaataaaaagcaaaggggatctaattatgatactaagttacttgaaaatcgaatttaaagttataatgcgtaaaaaaacaacattaatattatctattttatttcctgttatattctatatattatttacttcgatattggaattgccggaagatgttaaacctaaattttataaagagtatatgtatagtatgacggtttatagtttgttaagttttagtttactaacttttccattagatattattaatgaaaaacaaaatgaatggcgccaaagattaatggtaacaccatttacttttactagttattatatttcaaaagtagtgaaaactatgctgcaatttgcaatagcgatattagttatttttatggttggacatttttataaaggtgttgcaatgagtgcagttcaatggttagagtcaggaatatttttatggttaggtgcgtctctattaataacttttggcatattattttctttgttaaatgatattcaaaaaacaagtgctttagctaatatcgtaacaattggtttagcagtattaggtggattgtggtttccgataaacacatttccaaattggcttcaacatgttgctcatgttttaccgagctatcatttgcgtaaactaggtgtagatattgcttcaaatcatcatatcaatttaatatcatttgctataatactcttgtatgctttagggagtatattagcagtatattgtattagtcattttaaaagggcggaataaaatatgaaatttttaaaagatacttcaattgctgaaatatcgtctatactttatctgatttttcctattgccggtatattttttaatgaagtatatggtcccaaatggttgtatattatatcagtcattgtcttttcgttgtcgtatcttatattagttatagtaaataatagacttaatacattaatgttttacattttgttgattattcattattttattatttgttattttgttttcagtgtacatccaatgctaagtttgtttttcttttatagtgcttttgccgttccatttacttttaaaaataatgttaaaaaaacggcaactaatcttttcatactaacaatgattatatgtacaataataacgtacttattgtataacaactattttgttgcaatgatggtttattatgtcgttatatcgttaataatgctagataattttaaaaaaatgaaaaaccgtgaatatcaaaaagaaatagcagaaaaaaatagacatattaatacattaattgctgaacaagagcgacatagaattggtcaagacttacatgatacgttagggcatgtgtttgcaagtttatcattaaaatcagaattagcttataaactaatagatactgatgtagaaaaagtaaaagctgaattattagcaattaataaattatctcgtgaatcattgaacaaagttcgagaaattattgatgatgtaaaattaccatcatttattgaagagattgatagtatacgtaaagttttaaaagatgctgatattgattttacatttgaaaataaagaattagcgcaagtattaagtcctactaaacaatctatgttagttatgattacgcgtgaagcgataaataatgttattaaacatgcaaatgcttcaaaagttcatggtaaattaaaaactgtaaacaatcataaattactgcttatgattgaagatgatggcaaaggtatcgatagtgattgtgaggtgaaaagtatttcacagcgtgtacaacatttaaatggaactttagcagtcgactcaacaaatggaactaaaataatcattgaaatctcaacaggaggaatagcatgacatctttaattattgcagaagatcaaaatatgttacgacaggcaatggttcaattaattaaactacatggtgattttgaaattttagcagatactgataatggtctcgatgcaatgaaacttattgaagaatataatcctaacgttgttattttagatatagaaatgccaggcatgactggacttgaagttttagcggaaattagaaaaaagcatttgaatattaaagtgattattgtaacaacttttaaaagaccgggatactttgaaaaagcagttgtgaatgatgtggatgcatatgttttaaaagaacgttctatagaagaattggtggaaaccattaataaagtaaataacggagagaaagaatatagcgccacattgatgacttcattttttgtagataaaaacccattaacgcccaaagaacaaattgtattaagggaaattggcaatggtttaagtagtaaagaaataagtgaaaaattatttttgacagatggaacagttagaaattatacatctgttataattgataaattatttgcagataatcgttttgatgcttggaaaaaggcaaatgaaaaaggctggatctaaatacaaacaaaaaagtattgagtgttttgatttaagagacttggaaagtgagtcaataatcaaaatcttactcaatacttttattttggtactcgcaatttagatttgttaactaattttttcgcttattataaaacgaaacaatcaagtaaacgataaagcctacaaagatacccaataaaatagatagtactgccgtcactattaatggtaatttgaaaaatatttgtaggaaaataccaatgataattgcgataattactgcaattaatgtgactgtattttcatttgaaatgttcatttattttcactccttaacaataacattatatcatgctatagctttccaaaatattgaaatatgtagatatggctattgacgatatttcttaacttttatatgattaatcggaatgaaaaaagagaagtaggtggcaatatgaagtcaaataaatcgcttgctatgattgtggtagccatcattattgtaggtgtattagcatttcaatttatgaatcatacgggtcctttcaaaaaggggacgaatcatgaaactgtacaagatttaaatggtaaagataaagtacatgttcaaagagttgtggatggtgatacatttattgcaaatcaaaatggtaaagaaattaaagttaggcttataggggttgatacgccagaaacggtgaaaccgaatacgcctgtacaaccatttggcaaagaagcatcaaattatagtaagaagacattaacaaatcaagatgtttatttagaatatgataaagaaaaacaagatcgctatggtagaacattggcgtatgtatggataagtaaagatcgtatgtacaataaggaattagtggaaaagggacttgctagagagaagtatttttcaccaaatggcaaatatagaaatgtatttatagaagcacaaaataaagctaaacaacagaaattaaatatttggagtaaataattaaataggtgattatatatattaaagtaaaatatacttgaagcatcgatttattattaccataaatttatatatagaaataatttaaaggcataataaccatagtgcgtatcgagcgtaatggattattatgcctttgattttacttgaatatagctgtgatttgatcaacctgttctttatttaaagggtgtttagatagctctatggcttcgctaataatacgtcgtaacgaagattttgttgaaactgtatcaacatatttatctctttcttcagaaccttgaatgatattaactgtaccatcactaaagtaaataacaccggtactttggactttaaagttaaagttttgttcaatatgatcctttaatgctttcgcattatttgctgctaattgatacggatcataatcataaaaatcataaataacacgatttggttgaactgtttctgtaaaagtatagatagactttcttgatgaattaaactgatcatgatattgctggctaatgtaatgaccgacaactttttcaatattactattgcttatttctgtatcatgctcatcaggtacatcaaagtgataaaatgttttttcaccccagctttttacatcaacgtttattaaaccgatatctgaaacaatgataaaatcaaatgaacgtgcatactcgaaaaacggatgtttagtagctaaattgcttgtaacgataatatcgtaatattttaatttaccattttcgagatagctatctaaaatcttgcgtaattctcttttagcatttttgtatgcatggtggccaacatcattattagaactcagcatttgacttcttaattcagcattttctgcacttaatgctttgttctttttaataagttgctttcttgcataaacttcggtatctattttactattactatacctttgatttaaaactaatataccaattaatgctacaatgataatgataagtacaacataaaaagacattttttcaccaatcctttttgacttctttaactttgtatacaataataattaataaagattaattgttattcaatttcccacatttttattagttgattttagttcatcattgttataatcaaattataaactgacagatattgatgttcaatgaatatgacgtgaaagattcgtgaattcaagtttatgtcgaatttatgttataacggtcatttaaatgacagaattaggtcactcatagtattttgaagattgaattcattaattttaaaatgtataatgatatttgtgaaagcgcttgcttaggaggtgtatttgagagtgaatgaaatgaatgctaaagaacaattagtggacaatttaatgaaaacatcatcgcaattatttaaatttcacggtgaagttgccatgcagcttttcttaaatgatgaattaaaattaccttctattgttgaaatatgcgtggaacgtaagcgtttaagtgatattgtgaaagttattccgcaatcatatgcgttactatacatagataagcaagatcaagcaatagctaaagaagatttatcactttcaaaaattgcaaaagtttatgtgcaatatgatgatacaacaataatgagtattttcgtttatgatgtagtaaacgatgaatggatttttagattggatccgaatatacgtatacctaagagtaacatatacttccatagtttaaattgggatgtggattatattaaaccggagatcgttctaatgtatgatctaatgcaacaccatcagtatcatcattattccaattataaacgagtcatagatgcattaagctactatcaattttttattttaaaatttgtagtaggtgagcaacgtattaaggatgcaatccagagaacaataaataattaagaaaaagcaattcataacgcagttgaatacatgtgttacgaattgcttttatattagtttttatcacacaagttttttaatgcaaccccgtgatagcaaaactcatatgtagataatacagctttttcagcatcatctacatgaattccaaacatcatcgagatttccgaagcaccttggttaatcatttttaagttaatttttgattcagctaaggcatgtgtaattttatttgcagtaccgatgactttattcataccttcgccgacaatcattaatattgctaaatcatgctcaatacttagctcatcaacatcacatttttgacgaatttcatttaatacttttgtttctttattttgaatttgttttgagcgcataacgatactgatagtatcaatacctgaaggcatatgatcaaatgaaatattattatcctctaagacacctaatatctttctagtaaagccgacttgtctattcattaaatactttttgatattaataacggtaaaatctttatcacaacttataccgctaatcacatttttcgcatttatttctctatcatgcactataaatgtacctttatcttgagggcggttcgtatttttaatcaccacagggatgcgatctttataaagtggttgtaaggcttcatcatggaaaacactaaaaccagcataagataattcacgcatttctcgataagtgatttcttcgattaattcaggatctttgatgatatttggattagctttataaataccagacacatcggtgaaattttcataaattgtagctctaacaccacttgatatgatggcgccagttatatctgatccgccacgtggaaatgtaactatatatccttcatgagatacgccgaaaaatcctgggataattagtttctcatcataatctcttaattttttaatttcagagtaagcactatctaatatttgtgcttcttgtgggacgtcagtaacaaaaatacccgcttccttcggtgatatatattttgttggtataccttgactattattatataaagctatcaattgcgcattaaaatcttcaccacaagaaagtaatgcatctaatagtctctttggttcattttttaattgattaatataatgttccaaagtcacatctatcgtccgtaaaatactttcatccatttgcaattcttttacaatatcatcataacgctgaataatttctctttttttatcatgataatcaagatgattaatgaccttttcatataatctgattaacaaatcagttgttttaatatcattatcatgtcttttacctggagcagaaacgataacaatctttcgctctggatcagaattaacaatatttaaaacctttttaatttgagtagcattggagacggagctaccaccgaatttggaaactttcatagtgcatgccaacctttctaaaaaatcagaaaattgtattcagttttgtaagtaagaatgatattatgtatttatattttgaatattacgaactttacaaaaataaagaataattctatactatactatcatctagtgtttttcaataatacatttgtttttctcaaaagcacaaacggaggtacataaaatgaaaaaattaaatatagcattattaggattaggtactgtcggatctggtgttgttaaaatcatcgaagagaaccgacagcaaattcaagatacattaaataaagatattgtcataaagcatattcttgttcgagataaatctaaaaagagaccgctaaatattagccaatatcatttaactgaagatgttaatgaaattttaaatgatgattcattagatattatcgttgaagtcatgggaggaattgaaccaactgtagattggttaagaacagcacttaaaaataaaaaacatgttattaccgcaaataaagatttattagcagtacatcttaaacttttagaagatttagcagaagaaaatggtgtagctttaaagtttgaagcgagtgtagcaggtggtattccgatcgtaaatgccataaataatggtttgaatgcgaataatatttcaaaatttatgggaattttaaatggtacctctaattttattttatctaaaatgactaaagagcaaacgacatttgaggaagcacttgatgaagcgaaaagacttggttttgctgaagcggatccaactgatgatgtagaaggggtagatgcagcgcgtaaagttgtcattacatcatatttatcatttaaccaagtcattaaattaaacgacgttaaacgaagaggaattagtggcgtaactttaactgatattaatgtagccgatcaactggggtataaaattaaattgattggtaagggaatatatgaaaatggcaaagttaatgcatcggtagaaccaacgttaattgataaaaagcatcaattagcagctgtagaggatgaatataacgcgatttatgtcattggtgatgctgttggtgacacgatgttttatggaaaaggagcaggcagtttagcaacaggtagtgccgttgtcagtgatttattgaatgtagcattattctttgaatcagatttacacacattgccaccacattttgaattaaagacagataaaacacgggaaatgatggattcagatgcagaaattaatattaaagaaaaatccaatttctttgtagtagtgaatcatgtcaaaggttcaattgaaaattttgaaaatgagttaaaggcaatattaccatttcaccgatcattaagagttgcaaattacgataatcaatcatatgccgctgttatagttggattggaatcatcaccggaagaattaatcactaagcatggatacgaagttgacaaagtatacccagtagaaggagtttaattataatgagaagatggcaaggattagtagaagagtttaaagcacatttaccagtaaatgaaaatacaccaaaattaacattgaacgagggaaatacaccactcattcattgtgaaaatatgtctaaaatactaggcatagatttatatgtgaagtatgaaggtgccaatccgacaggttcatttaaagatcgcggtatggtaatggctgtgacaaaagcaaaagagcaaggtaagaaaattgtaatatgcgcttcgactggaaatacatcagcgtctgcagcagcatatgcagcgagagcaggtttaaaagctatcgtcgtaataccagaaggtaaaattgcattaggtaaattgtcgcaagcagtaatgtatggtgcagaaatcgtttctattgaaggaaactttgatgaagctttagaaattgtaaaagaaattgcaaaaagtggcgaaatcgagcttgtaaactctgtcaatccatttagaatcgaaggacaaaagacaggctcatttgaaattgtacaacaattagacggtgaagcacctgatattttagcgattcctgtaggtaatgcaggtaatattactgcatattggaaaggctttaaagaatatcatgaagctaaaggatcacaattgccgaaaatgtttggcttccaagctgaaggcgcatcaccaattgttcaaaataaagtcattaaaaatcctgaaacgattgcaactgctattcgaattggtaatcctgctagttgggataaggcgactaatgctcttaaagaatcaaatggattaatagatagtgttactgatgatgaaattctagaagcatatcagttaatgacaactaaagaaggtgtctttagtgaaccagcgagtaatgcttctattgcaggtttaattaaattgcatagacaaggtaaattacctcaaggtaaaaaagtagttgctattttaactggtaatggattaaaagatcctgatactgctatttcactactagataatccgataaagccattgccaaatgataaagatagcattatcgattatattaaaggagctttataacatgtcgaatgttttggagttaacaattcctgcatcaacagccaaccttggagttggctttgattctataggtatggctttagataaatttttgcatctgtctgtaaaggaaacatcagggacaaaatgggaatatattttccatgatgatgcatctaagcaattgcctactgacgaaacaaactttatttatcatgtagcacaacaagttgcttctaaatatagtgttgacttgcctaatttatgtatcgaaatgagaagtgatattccattggcaagagggttaggttcgtcagcttctgctttagtaggagctatatatatcgcaaattattttggtgatatccaactgtctaaacatgaggtattacaattagcgactgaaatcgaaggacatcctgataatgttgcgccgaccatttatggtggtttaatcgctggatattataatgatgtctcgaaagaaacgtcagttgcacatatcgacataccagacgtggatgtgattgtaacgataccaacttatgaactaaaaacagaagcatcaagacgtgctttaccacaaaaattaacacatagtgaagcggttaaaagtagtgcaattagtaatacaatgatttgtgcattagcacagcacaattatgaattagcaggtaaactcatgcaacaagatggctttcatgaaccgtatcgtcagcatttaattgctgaatttgatgaagtgaaaacaattgctagtcaacataatgcctatgcaactgtaattagtggtgctggaccaactattttaatatttagtcgtaaagaaaatagtggggaattggttcgctctttaaatagtcaggtagtatcatgccattctgaattggtcgatattaatatcagtggtgttaaagaacgaattgtataccaatagacgctttatattgtaaaatagtattaaatgcagaatagagaggagatttaatgcgatatgacaaattataaagttgtcgttttagatatggatgacacattgctaaattcagataatgtgatatcagaagaaactgcaaattatttaacagcaattcaagatgaaggttattatgttgttttagcatctggtagacctactgaaggtatgattccaactgctagagatttaaaattacctgaacatcatagctatattattagttataacggtagtaaaacgattaacatgactaatgaagaagtagaagtaagtaaatcgattggtaagcaagatttcgatgaaattgtagattattgtcgagacagaggctttttcgttcttacatatcatgatggtcaaattatttacgacagcgaacatgagtatatgaatattgaagcagaattaacaggtttaccgatgaaacgtgttgatgatatcaaagcgtatattcaaggcgatgtacccaaggtcatgggtgtagattatgtagcgaatattacagaagctagaattgatttgaatggtgtgttcaatgataatgtagatgctacgacaagtaagccattcttcttagaatttatggccaaagatgtttcaaaaggtaatgcaattaaagcgttatgtcacaaattgggatattcggtggatcaagtcattgcttttggtgatagtatgaatgataaatcaatgtttgaagtcgcaggtctagctattgctatggggaatgcatcagatgaacttaagcaatatgcagatgaagttacgttggaccataatgaaaatggtattccacatgcgctcaaaaaattgttataaattttaaaataagccttaacacatgatatttgaataagatatcttgtggttaaggctttttatttatgtgaaaatgacttcagttatactatggaggatttgaaatacatattttagattagtaatgatatcaaacgaatagagtaaatgtatattttttgaataaatcaagtattaactagtcacggaaggtagataaataaatttgaatcattctgaataataacgaatgtattaaaaaatgcagtgacaatctaacattaattgttaaaatcactgcaagcatcttgattttatttagctgtttgtgtccagtcatgcttccctctgaagcgttttacatgagcatatatttggtcagcagtataatctaaatttgtataaactgtaatactgaacgctgattggttttcagcaaatgattcttcggaaaataattcctttaagtgcgtaaataaatcattcatttgtttatggtttaaaccgggatattcccttaaagttctctttaataattgtccgttcttttcttctaatgcttgaactacaataacaaatctctcatcttgctttagtacatcatcaaataaatttgtttgtccaatcattgaatttcacccctgaaaagttattgttatctatattatacacgatatgcaaaatatctaaaataaagaatggtaacatggtcataataaaatataaacagaatactagttaatacactttatactagaaaaagatattaaagtatatctactttacagcattaaaaaagcggcaaatgctatagataatctaaagcatctgccgtgtgagaatttatttatttatttttgattgtcataatcgtgtggttttaaattaattgtttctagctttacaaattttgttttgtgaatgattttatgaataaagtaaatcaacgctagaatgattaaaggtaaaaagtttttaaaagcatttaaccattgatcttttaaaatatattcaactgaaccaccaaatagcaagaataatagcgtagtgatgacaatgattggtcctaatggataaaaaggtgctttatatggtagaaccttattaggatcttgaccttgttttttaatagcttgtcgcaatcgtatttgtgaccaaatgcttgatccccaaacaactataatcattgaaccaataatttcaagtaaattaaaaacggcatttgaattaaagtttgcataaataataacaataacaacgactgcataagttgttaatagtgctcttaaaggtaactttgttgtcttgtttaatttacttaaaaattggggtgcttttttgtctgaacttaaggaatacaacattcttcctgttgtataaacacctgaatttgcagcggataataatgaagttaaaataaccgcgttgattactgatgctgcaaaggctatgcctactctatcgaatacaattgtaaatgggctttgacttattgaactacttgctcttaataatgatggatctgtgtacggaataattgcaccaattactgcaattgataagacatagaataaaagaatacgccaaaatacttgtttaattgccttaggcatagactttttagggtcatctgattcaccagcagttactgctactacttctgtaccaccaaccgaaaatccggcgactaataatacgcctaagaaaccagagataccaccaacaaacggtgcttggccttttgtatagttttcaaatccatatgcatgaccacctaagatgccaaaaatcattaaaaagccaaaaataacgaatacgataattgttaacactttaatcaatgataaccaaaactcagtttctccaaatgattttacagaaaaaatgtttaataatagtaaaattgtaataaagattaagctccaagtaatggggtggaaaaatttaaatgtgtcccagaaataaagcacatttgacgctactatgacatcaacacttgtaactaatgaccacaatgcccaatacaaccatcccatggtaaagcctagagatgagtcaataaagcgtgttgaataagagctgaatgaacctgatactggataaaatgttgccaactctccaattgatgacattaagaaatatagcatgacaccaataacaagataagcgagtatagcgcctccaggaccagcttgagaaatgatattaccagtagctacaaatagaccagtcccaattgcaccacctatagcaatcatggaaatgtgtcttgagttaagactacggttcattttattatcttccatatttagtctcccatctatttaaatatacccattattgtaagctttttaagtgtactattcaataactatttagtactgtaaagcgaaaaaattaaaattttctgattttttaatcatcttgagcatgtttaattgtaattttgatggggttaaattataatatgtattaaattataattattataaattgtggagggatgactatgtcacaacaagacaaaaagttaactggtgtttttgggcatccagtatcagaccgagaaaatagtatgacagcagggcctaggggacctcttttaatgcaagatatttactttttagagcaaatgtctcaatttgatagagaagtaataccagaacgtcgaatgcatgccaaaggttctggtgcatttgggacatttactgtaactaaagatataacaaaatatacgaatgctaaaatattctctgaaataggtaagcaaaccgaaatgtttgcccgtttctctactgtagcaggagaacgtggtgctgctgatgcggagcgtgacattcgaggatttgcgttaaagttctacactgaagaagggaactgggatttagtagggaataacacaccagtattcttctttagagatccaaagttatttgttagtttaaatcgtgcggtgaaacgagatcctagaacaaatatgagagatgcacaaaataactgggatttctggacgggtcttccagaagcattgcaccaagtaacgatcttaatgtcagatagagggattcctaaagatttacgtcatatgcatgggttcggttctcacacatactctatgtataatgattctggtgaacgtgtttgggttaaattccattttagaacgcaacaaggtattgaaaacttaactgatgaagaagctgctgaaattatagctacagatcgtgattcatctcaacgcgatttattcgaagccattgaaaaaggtgattatccaaaatggacaatgtatattcaagtaatgactgaggaacaagctaaaaaccataaagataatccatttgatttaacaaaagtatggtatcacgatgagtatcctctaattgaagttggagagtttgaattaaatagaaatccagataattactttatggatgttgaacaagctgcgtttgcaccaactaatattattccaggattagatttttctccagacaaaatgctgcaagggcgtttattctcatatggcgatgcgcaaagatatcgattaggagttaatcattggcagattcctgtaaaccaacctaaaggtgttggtattgaaaatatttgtccttttagtagagatggtcaaatgcgcgtagttgacaataaccaaggtggaggaacacattattatccaaataaccatggtaaatttgattctcaacctgaatataaaaagccaccattcccaactgatggatacggctatgaatataatcaacgtcaagatgatgataattattttgaacaaccaggtaaattgtttagattacaatcagaggacgctaaagaaagaatttttacaaatacagcaaatgcaatggaaggcgtaacggatgatgttaaacgacgtcatattcgtcattgttacaaagctgacccagaatatggtaaaggtgttgcaaaagcattaggtattgatataaattctattgatcttgaaactgaaaatgatgaaacatacgaaaactttgaaaaataaatttgatatgtagtttctatattgcgtagttgagcagtttatgatatcataataaatcgtaaagattcctaacaagagagggtgtttaacgtgcgcgtaaacgtaacattagcatgcacagaatgtggcgatcgtaactatatcactactaaaaataaacgtaataatcctgagcgtattgaaatgaaaaaatattgcccaagattaaacaaatatacgttacatcgtgaaactaagtaattcttatcattcaaatacgacgatttgaaaataaagcgggcttacctattatattggggagctcgcttttttatgaaatttttgtgaagagtgattaacgaattgagtttcatcgatagaacaatatatgattgtattagttgttactttattaaaatttgagaatatttatagaaggaaatagattactgattttataaagtcactttgttagcgaatgctcgttgttagcaaatgcttgaaagagtatttaatatagtagaatttaaaattttaaagcggaatttaataagtacgaagtaattctggatatgttttataaatgttcgacaatacactttaatgttaaatatgatggtttagaaaatgatttaacaaagaaatgaaactttactgttgaattatgtgaggattgtgttattatataaatcgtaataattacgattcgataaaaagtgaggtaactatatatggctaagaaatctaaaatagcaaaagagagaaaaagagaagagttagtaaataaatattacgaattacgtaaagagttaaaagcaaaaggtgattacgaagcgttaagaaaattaccaagagattcatcacctactcgtttaactagaagatgtaaagtaactggaagacctagaggtgtattacgtaaatttgaaatgtctcgtattgcgtttagagaacatgcgcacaaaggacaaattccaggtgttaaaaaatcaagttggtaaaatcaaatttcgtactttagcccatttacaatatcaataaaacaatgtacagtatatacgaatgctataaactgaatgttttctcatattaataaggaaacattcggtttttaatttgcatttaaaaataattagtttttaaaggggctatttaaagtgaaaatatttgattacgaagatattcaattaatacctaataaatgcatagttgaaagtaggtctgaatgtgatacaactatccaatttggtccgaaaaaattcaagctacctgtagttcctgcaaatatgcaaacagttatgaatgagaaattagcgaaatggtttgctgaaaatgattacttttatatcatgcatcgttttgatgaagaagcaagaataccttttataaaacatatgcaaaattcaggcttatttgcatctatttcagttggtgtaaagaaagcggaatttgattttattgaaaagttagctcaagaaaaattaatccccgaatatattacaatagatattgcgcatggtcactcagattcagtgataaacatgattaaacatataaaaaaacatatacctgatagttttgttattgctggtaatgttggtacgccagaaggtgttagagaattagaaaatgctggtgctgatgctaccaaagtcggtataggtcctggtagagtttgtattacaaagattaaaacaggttttggtactggtggttggcagttagcggcattaaacatatgtagtaaagcagctcgtaaacctttgattgccgatggtggtataagaacgcatggcgacatcgctaaatcaattagatttggtgcatcaatggtcatgattggttcattatttgcggcacacgaagaatcacctggtgaaactgtagaacttgatggtaaacagtataaagaatattttggtagtgcatctgaatttcaaaaaggcgaacataaaaatgtagaaggtaaaaaaatgtttgtagaacataagggttcattaatggataccttaaaagaaatgcaacaagatttacaaagctcaatttcatatgccggtggaaaagacttgaaatcattacgtactgtagattatgttattgttagaaactctattttcaacggtgatagagattaatatttatagtaggtgatgtaaattaaaaaattcatagtaactgttgttgcgtttttatcaattattatcattgcgccaataacagaatttaaaccattcattcatttacaaaatgaagtaagacaatatattgacattcacatcaataaagaaacaatttctgcggaaaataaattggatacaccgaagaaacaacaatttgcctttaataatatacaaatgaacatgtcgaaatcagatgttgagaaaacattaaataaaccaaaaagagtgacatttaatgaatatggtacgaagtggtatacgtattatgatgatgattacaataattttatcatggtaagctatattaaagataaagtaaatgcgttatatacaaatcaaaatatcattacttcaaaatcaaaaattaaatacaatacaccgaaatcggttgtaaggcaaagattaggcgaaccagaggcagagattgttaaaggtagagtgcgttacgaacaaaataataaagaatatgatgttttccataaaaatcacatttatacgacggtattttatgataagcatcgacgtaataatgtaacagctgttttacaagtaagtgatgctatggaaaatagattaaaagaacaatatggagcaccttcgaaatcgcttgcagatagttttgaactacaaaattttgatatagttaatgctgaaagaaaacaaaatcaattatctacattgaagtattctaaacagaattctgaaactgctcgtaagcatagtaaagatatggccaacaatcattattttgatcatacaaatttaaaaggtcaatcaccatttgatcgattgaaaaaagatggtattacatttaactcagccggagagaatttagcatatggtcaagttagtagtatctatgcacatcaaggattaatgaattctattggtcacagaaaaaatattttaaatgatacgtttaaaatattaggtgttggtgttgattttaatgatgaaaaacaacctttttggacagaaaattatactggttaatgtttttggcatgagattaaagggtaatgtttgtctgtaaggaagtagataaacatgatgacaacagataaaccaaaagatgcggatatacttgaacgcgtcaaagatatacttaataaaaaagaaagaaaaaaataataatggctcgctcctgtaaattattacgggggcgagttttaatttgtgtaacattttgcaggaatctgtaattcaaaatttatattaaagaatgagattatctaacaattcgcaatttctgtttgaactgaatttagattagaataaataaaacctcttgaaaacgaaactttttcaagaggtccaaaatttataaaaatgagggtttaacaattacgataatatataacggtttaaaatattacatttcgcggtacaaaccaattactttcccaattacagcaacattgtcgaggtaaattggctccattgtactattttcaggttgtaatcgataacgatttttttctttatagaagcgtttgacagttgcttcatcttcctcagtcatagcaacaataatgtctccattttctgctatggtttgactgcgaacaattactttgtctccgtctaatataccagcctcaatcatactgtcgcctacgacgtttaatatgaatatgtcgctattatgtgtcgatgttaagtgttcaggtaatggaaaatactcttcaatattttctacagcggtaataggaacacctgctgtgactttaccaataactggcacatgaatcgtttcttccatattaatattatcatttgtttgatcacttacaatttctatagcacgtggtttcgttggatctcttcttatatatcctttttcttcaagacgtgaaaggtgaccatgaacagttgaactggatgctaagccaactgcttcaccaatttcgcgaacactaggcggataacctttcatttgaacaacttgtttaatatagttatatatttcgctttgtcgttttgttaattctctcatatataggcactccctaaattaatttaaatacagtatatcattaattcacaaccaaaacaaacatttgttcgttaaaatattgacacagaacataagttctgataaattacttatacaaacaaatgttctaggagtggaaatgatgttttacaataaatataaaaacgtatcaacatatatcatcatatttttagtttcaagtgcagcctttgcaatattcttgttaagtgcgaacgttagtgctcactcggaacaagtgtacgaaatgactgaccatcaaattaagaacaatacgataaataaagcatacgaacataaagaccctacaaacaatggcgaacaaagagatgggaaagtgttcgctttaataaattgatacattgtcacaacgttattttgcctatttttgcgaaatagcgtttttttattacttttttgctggtcttaaatttgttatattttgttaaagtattataatgattgaataaacaaattgaaggtaggttttttaattgagtaattctgatttgaatatcgaaagaattaacgagttagctaaaaagaaaaaagaagtaggattaactcaagaagaagcaaaggagcaaacagccttaagaaaagcttatcttgagagttttagaaaagggtttaagcaacaaattgaaaatactaaagtaattgatccagaaggtaatgatgtaacacctgaaaaaattaaagagatacaacaaaaaagagataataaaaattaaatcacaaatctgtaaagaattttctgacattataacttgaaataagtattttacttatctttttattttaaaataagttataatgtatttgataaaattgaagaagggaagatacacaagatgtttaatgaaaaagatcaattagctgttgatacgctacgtgcactaagtatcgacacaatcgaaaaagcgaattctggtcatccaggattacctatgggagctgccccaatggcttacactttgtggacacgtcatctgaattttaatccacaatctaaagattacttcaatagagaccgtttcgtattatcggcagggcatggttcagcattattgtatagcttgttacatgtttctggtagtttagaattagaagaattaaagcaatttagacaatggggttctaaaacaccaggtcatcctgaatacagacatactgatggtgtagaagttactactggaccacttggacaaggttttgctatgtcagtaggattagctttagcagaagatcacctagcagggaaatttaataaagaaggatataatgttgtagatcattacacatatgtattagcttctgacggtgatttaatggaaggtatttcgcatgaagcagcttcatttgctggacataataaattaagtaaattagttgttttatacgattcaaatgatatttcattagatggcgaattaaacaaagctttttctgaaaacacaaaagctcgttttgaagcatatggttggaattacttactagttaaagatggtaatgatttagaagaaattgataatgcgattactactgctaaatctcaagaaggaccaacaattatcgaagttaaaacaacaatcggatttggttcaccgaataaagcaggaactaatggtgttcatggggcacctttaggtgaagatgaaagaaaattaacatttgaaaattacggtttagatcctgaaaaacgttttaatgtttcagaagaagtatacgaaattttccaaaatactatgttaaaacgtgctaatgaagatgaatctcaatggaattcattattagaaaaatatgcagaaacatatcctgaattagcagaagaatttaaattagcaattagtggtaaattgcctaaaaattataaggatgaattaccacgttttgaacttggtcataatggtgcatctcgtgctgattctggtactgttattcaagcaatcagtaaaactgtcccttcattctttggtggatcagcagaccttgctggttcaaacaaatccaatgtaaatgatgcaactgattatagttctgaaacacctgaaggtaaaaatgtgtggtttggtgtacgtgaatttgctatgggtgctgctgtaaatggtatggctgcacatggaggtttacatccatatggtgcaacattcttcgtatttagtgattatttaaaaccagcgttacgcttatcatcaattatgggattaaatgctacgttcatcttcacacatgattcaattgcagtaggtgaagatggtcctactcatgaaccaattgaacaattagctggactaagagccattccaaatatgaatgttatccgtcctgcagatggtaatgaaacaagagtagcatgggaagttgccttagaatctgaatctacacctacttcattagtattgacacgtcaaaacttaccggttttagatgtaccagaagatgtagttgaagaaggcgttcgaaaaggtgcctatacagtttatggctctgaagagacaccagaattcctattattagcttcaggttcagaagttaatcttgcagttgaagctgctaaagatcttgaaaagcaaggtaaatcagtgcgtgttgtttcaatgcctaactggaatgcatttgaacaacaatctgaagaatataaagaatcagttattccatcaagcgtaacaaaacgtgttgcgattgaaatggcttcaccgctaggatggcataaatatgtgggtactgcaggtaaagttattgctattgacggctttggcgcaagtgcacctggcgatctagtagttgaaaaatatggctttacaaaagaaaatatcttaaaccaagttatgagcttataagaataatttataaagcgagtatgtttagaagtctaggatgcataatcttaggcttcttttaaagtgttgaaatttagagtatagcactcaaactacatcataagtgataagttttgaaaatatactatttcagattaatctttaaaacctctgttataacagcatgatttttgatattatttttagtatcgatattaaaatacttgaataaactagttcttgaaataatgtgatgaatttagtaaaattcagtaggataaagaaagcgggtgaaacaatggcaacttggttagcaattatttttatagtagctgcattaattttaggtttaattggaggtttccttttagctagaaaatatatgatggactacttgaagaaaaacccaccaatcaacgaagaaatgcttcgtatgatgatgatgcaaatgggtcaaaaaccttctcagaagaaaattaatcaaatgatgacgatgatgaataaaaatatggatcaaaatatgaagagtgcgaaaaagtaaattcgcaattgatagaggctattttccagatatggaaatagcctctttttataatcaaattaataaaaacaaatatgtttattaaaattaaagttaacaaaatgacgaatagactgagaaatgctataattcattttgtatgatttacagagagtttatttaacgagaaggtgtctgcgtgctctatttaatattttcaatcattgtagctttatttatgggaactatagttatagttattcgtatgaaagctcaaaattatccggtaaatgagaaaaaaatagttttgccaccgttttttatggcgaccggtgcattaatgtacgtcgttccatattttaggctaacaggatcggaaatgctagaagcctttataattggtttgcttttttctacagttctaatttggacttctcgatttgaagtcaaaggtacagaaatttatatgaaacgatctaaagcatttccagttattttgatttcattacttatcattcgtactgtgatgaaaatattcattagtaatgaaatagatcctggagaattaggcggcatgttctttttattagcattctgtatgattgttccttggagagcagcaatgctatataaatacaaaaaactaaagaaaacattaatcaattaattacttttaaaaccacttgtgatcgacttctaaatcagtcaatgagtggttttaattttacttgaaaaggtgaaatgattatattaaaataaaagcgaacaaatgttctatatggaggcagtaatgaaaattatacatacagcagactggcacttagggaaaatattaaatggcaaacagcttttagaagatcaagcgtatattttagatatgttcgtagaaaaaatgaaagaagaagaacctgatatcattgtgatagctggagatttatatgacacaacatatccaagtaaagatgcaatcatgttattagaacaagcgattggaaagttaaatttagaactgcgtataccaataattatgattagtggaaatcacgatggtaaagagaggttaaactatggggcgagttggtttgaacataatcagttatttataagaacagattttacatcgattaattcaccaatagagataaatggggttaatttttatacactcccttatgctactgtgagcgaaatgaaacactactttgaagatgacaccattgaaacacatcaacagggaattacgcgctgtattgaaacaatagcaccggaaattgatgaagatgccgtcaatattttaattagtcatctgactgttcaaggtggaaagacatctgattctgaaagaccattaactattggaacggttgaatcagttcagaaaggtgtttttgatatatttgattatgtcatgctaggtcacttgcatcatccatttagtatagaagacgacaaaattaaatatagtggctccttattgcagtattcattttcggaagcgggtcaagctaaagggtatagacgtgtaacaattaatgatggcattattaacgatgtatttattcctcttaagccacttagacaattggaaattatctcaggcgaatataatgatgttattaatgaaaaagttcatgtgaaaaataaagataattatttacattttaaacttaaaaatatgtctcatattactgatccaatgatgagtttaaaacaaatttatcctaatactttagcgctgacgaatgaaacttttaattacaatgaagaaaataatgctatagaaataagtgaaaaagatgacatgtcaattatcgaaatgttttataaacatataactgataaagaattatcggatatccaatctaaaaagataaaaaatattttagaaaacgaattgagaaaggaggattaatgaatgaaaccattacatttaaagttgaataatttcggcccctttttaaaagaagaaattgatttttctaaaattgataataatgaattgtttttaataagtggtaagactggatcgggtaaaacaatgatttttgatgcaatgacttatgccttgtttggtaaagcatcaactgaacaaagagaagaaaatgatttgagaagtcatttcgctgatggtaaacagccgatgtcagtaacatttgaatttcaattaaatcatcgaatttataaagtgcatagacaaggcccttatatcaaagaaggtaatacaacaaaaacgaacgctaaatttgatgtatttgagatggtggatggcaagtatgaaattagagaaagtaaagtaatttcaggtacccaattcattattgaattattaggagtaaatgcagatcaattccgacaattgtttattttgcctcaaggtgaattcaaacgctttttaatatcaaacagtcgtgaaaagcaagggatattaagaacactgtttgacagtgaaaaatttgaagctatacgagaaatattaaaagaagaagtaaaaaaagaaaaagctcaaatcgagaatagatatcaacaaattgaccttttatggcaagaaattgaatcatttgatgatgacaatataaaaggcttattagaggttgccactcaacagatagacaaattgattgaaaatataccacttttacaagctaggtcgaaagaaatactagcatctgtaaatgaaagtaaagaaactgctattaaagaatttgaaataatagaaaagaaaacattagaaaataatatattaaaagataatattaatcaactcaacaaaaataaaattgatttcgttcaattgaaagaacaacaacctgaaatagagggaattgaagctaagttaaagttgttacaagatattacaaacctattgaattatattgaaaatagagaaaaaattgaaactaaaattgctaatagcaaaaaagatatttctaaaaccaataataaaatattgaatcttgattgtgataagcgaaacatagacaaagagaaaaaaatgttagaagaaaatggagatttaattgaaagtaaaatctcttttattgataaaactagagtattatttaacgatattaataagtatcaacaaagttatctcaatattgaacgcttgagaactgagggtgaacaattaggtgatgaattaaatgatctaattaaaggtttagaaacggtcgaagattcaataggtaataacgaaagtgattacgagaaaattatcgaactaaataatacgataacgaacataaataatgaaattaatataattaaagaaaatgaaaaagctaaagctgaattagataaactattaggtagtaagcaagagttagagaatcaaattaatgaagaaacatctatattgaagaatctcgaaataaaattagatcgctacgataaaacaaaattggacttaaatgataaagaaagctttataagtgaaattaaatctgctgtaaatattggagatcaatgtccgatatgtggtaatgaaattcaggatttagggcatcatattgattttgaaagtattgctaaacgtcaaaatgaaattaaagaaattgaagcaaatatccacgctataaaatcgaatattgctgtgcataattctgaaattaaatttgttaatgaaaaaatatcgaatattaatattaaaacgcaaagtgatttttcacttgaagtattgaataagcgtctgctagaaaatgaaaatgcattgaataatcaaagagatcttaataaatttatagaacaaatgaaagaagaaaaagataatctaacgttgcaaattcataataaacaattgcgtctaaataaaaatgaatctgacttgaaattatgtcgagatctcatcactgaatttgaaacactctcgaaatataataatatcactaattttgaggtggattataagaagtatgttcaagatgtgaatcagcatcaagaactctcaaaggagattgaagataagttaatgcaattgtctcaaagaaagttaattgagcaaaataatctaaatcactatgaaaatcaactagaaacttacaataatgacttagaattgaatgaacaatctattgaaatggaaatgtcgaggctgaatttaactgacgacaatgatataaatgaaataatagcctggaggggcgagcaagaggaattagagcagaaaagggatacttataaaaaacgttatcatgaatttgaaatggaaatagctaggttagaatcattaaccaaggataaagagttattggactctgataaattaaaagatgaatatgagctaaaaaaagaaaagatgaatacactgatagatgaatactctgctgttcattatcaatgtcaaaataatattaataaaacacaatctatagtttcgcatattaattacttaaatcaagaattaaaggatcaacaagaaatttttcaattggctgaaattgtcagtggtaagaataacaaaaatcttacattggaaaactttgtcttaatttactatttagatcaaattattgcccaagcaaatctgagattagcaacaatgtcagataatcgataccaactaattaggcgagaagcggtttctcatggtcttagtggcctagaaattgatgtatttgatttgcattcaaataagtctagacatattagctcgttatcaggtggagaaactttccaatcgtcgcttgcattagctttagggttaagcgaaattgtacagcagcaatcaggaggtatttcactagaatcaatatttattgatgaaggattcggtacattagatcaagaaacgcttgaaacagcgttagacactttattaaatcttaaatcaactggtagaatggttgggattatttcacatgtgagcgaattgaaaaatagaatacctttagttttagaagtgaaatcagatcaatatcagagttcaacaagattcaaaagaaattaaaacataaaaaatagagatggtactttggaatgtatagaacaaccttagcccatctctttttatttaaaaattattttttctcacgtaataaatctctgatttcagttaataacacaacattttcttccacaactgcttcttcttcggcttcttctttcttcattaatgtatttgcaatcttaacaaagatgaataaagcaaacgcgatgataataaagtcgataacagattggataaacaaaccgtatttaataccccagaatgaccattctttagcaaaatcaactgatccgaaaattttaccaattaatggcataatgatattttctactaatgaagatataatcttgttgaaagctgcacccatcacaacagcaattgctaaatctaagacgttaccttttaaggcgaactctttgaattcttttaacattacactcaacctctcttttttaaatgtaacctcaattatacaacaaataaaaaaattagaaaatagattattcaagaaaatttgattatcgcaaagacctttgttatcctataaaggtgcgtgagttattgaataaaatgtttagataatctttttattctactacataaaattaaatatagaattgaagggagtaattaattatgaattcttcttcaccagagaatccaaatggaaagaagtattcaccagtcttcatctatagtgcaattgttgttgctatagtcgtattacttggtgcatttttacctgaacaattcaactatgttaccaataatattaaaatgtggattacagaaaagttaggttggtattatcttattcttactacgattatcgtgttcttctgtatattccttatttttagtcctattggaaaacttaaactaggtaaaccaaatgacaaacctgagtttaatacaatttcatggtttgctatgttgtttagtgctggtatggggataggtttggtgttttatggtgcagctgaaccgatggcgcactttgctacgccacctacagcagatcccaaaactactgaagcttatactgaagctctacgttcaacatttttccattggggattccatgcttgggctgtttatggtgttgttgcgttagcgttggcatattcgcaattccgtaaaggtgaaccaggtttattatctagaactttacgtcctcttttaggtgataaagtagaaggtcctattggaatttttattgacgttttatctgtatttgcgacaatcgttggggtagccgtttcgttaggtatgggtgctctacaaattaatggtggtttacattacttgttcaatgttccaaacaatacgtttgtacaagcgattatcatcattgttgttactatcttatttatagcaagtgcatggtctggattaagtaaaggtattcaatacttaagtaacttgaacattggtttaggtactattttaatggtagctgctttaattgttggaccaactgttcttattttaaatatgttaactagctctacgggtagtttactaaacacattcttgtttaatagttttgatacagcagctttaaatcctcaaaaacgtgaatggatgtcttcatggacactttattactggggttggtggttaagttggagtccattcgttggagtgtttattgcacgagtttcaaaaggacgttcaattagagagttcatttctggtgtcttgctagttccagcaattgttagttttgtttggtttagtgtctttggtgtattaggcatcgagacaggtaagaaacacaaagaaatttttgatatgactcctgaaacacagctatttggagtgtttaatcatgtgccatttggcattgttttatcgttgattgcattattattaattgcatcattctttattacatctgctgactcagcaacatttgtattaggaatgcaaacaacatttggttcattaaatccatctagtatggtaaaagttgtttggggaatttcacaggccttaatagcatttgtacttttattagctggtggcggtaacggcgctgaagctttaaatgcgattcaaagtgctgcaattataagtgcattcccattctcctttgtcgtcatactcatgatggtaagtttctacaaggatgcgaaccaggaacgtaaattcctaggtttaacattgactccgaataaacatcgcttacaagaatatatcaagagtcaacaagaagattatgaatctgacattcttgaaaagcgtcagtcacgtagaaatatagagaaaaaagataactaataaagtttagttaagtattttaataacaagtagtatgtcattctagtagctagaacagatatactacttgtttgtttttgtggaaaattgagtatattcaaaaggataagaacgagaatttcgttattaaactacgaattctcgatttttttatattttaagataggtttatttctgacaacttaatagaaaggggtttgacaaagctaaagtgaagtttgacggtataaacaaaaattaactatacttttataaaaaattaactcaggctgggacataaatcaatattctatgctctacgaagttatattggcagtagttgactgaacgaaaatgcgcttgtaacaagcttttttcaattctagtcaggggccccaacacagagaatttcgaaaagaaattctacaggcaatgcgagttggggtgagggccccaacacagaagctgacgaaaagtcagcttacaataatgtgcaagttggggatgggccccaacaaagagaaattggattcccaatttctacagacaatgcaagttggcggggccccaacatagaagctggcggaaagtcagtttacaataatgtgcaagttggggtgggacgacgaaataaattttgcgaaaatatcatttctgtcccactcccatcaaaagaatgacattgaaaagaaatattaaagtttggcgccacaattttctttctgctcaatgaaataatacgtttgaaaattgaattgaatcattcacgaaattgataattattctcaattaataaaaaatacttattacaccttacctgtatgataagttttgcttatatactctgattaaaaagtcaaaacctaaattaagcgttttctaagcatgatgagttgtttatcaataaatataataatacaatttaatcaaggcatataaatataaaaatgtatcaagggggatcattaaatggctgcaaattttaaagagcaatcaaaaaaacattttgacttgaatggccaaagttatacttactatgatttaaaagctgtagaagagcaaggtattactaaagtttccaatttaccttattcaattcgtgttttgttagaatctttacttcgtcaagaagatgattttgtaattacagacgatcatattaaagctttaagtcagtttggaaaagatggaaatgaaggcgaggtaccatttaaaccttctcgtgttattttacaagatttcacaggtgtaccagccgtagttgatttagcttctttacgtaaagcaatggatgacgttgggggagatattactaaaattaatccagaagtaccggtggatttagttattgaccactcagttcaagtggatagctatgcaaatccagaagctcttgaacgtaatatgaaattagaatttgaacgtaactatgaacgttatcagtttttaaattgggcaacgaaagcatttgataattacaatgcagttcctcctgcaactggaatagttcaccaagttaacttagaatatttagcaagtgttgtacatgttcgtgatgtagatggtgaaaaaactgcatttccagatacattagttggtactgattcacatacaacaatgataaatggtattggcgtactaggatggggtgttggtggtattgaagctgaagctggaatgcttggacaaccttcttatttcccaattccagaggttattggtgtacgactagtaaattcattaccacaaggcgcaacagcaactgatttagcgttaagagtaactcaagagctacgtaaaaaaggtgttgttggtaaatttgtggagttctttggtccaggtgtacaacatttaccactagcagaccgtgctacaattgcaaacatggcaccagagtatggagcaacttgcggattcttcccagttgatgatgaatctcttaaatatatgaagttaactggtagatcagacgaacatatcgcgctagtaaaagaatatttgaaacaaaaccatatgttctttgatgttgagaaagaagatcctaattatacagatgttatcgaattggatttatcaacagttgaagcatcgctttcaggaccaaaacgtcctcaagatttaattttcttaagtgatatgaaatcatcatttgaaaattctgtaacagctccagcaggcaaccaaggacacggtttagataaaagtgaatttgataagaaagctgaaattaactttaaagatggatcaaaagctacaatgaaaacaggtgatattgcaatagcagcaattacatcatgtacaaatacatctaacccttatgtaatgttaggtgcaggtttagttgctaaaaaagcagttgaaaaaggcttgaaagttcctgaatacgttaaaacttctctagcaccaggatcaaaagttgttaccggatatttaagagatgctggcttacaaccttatttagatgatttaggcttcaacttggttggttatggatgtacaacttgtatcggtaattcaggtcctttattaccagaaattgaaaaagcgattgctgatgaggacctattagtgacatctgtattatctggtaatcgtaactttgaaggtcgtatccatcctcttgttaaagccaattacctagcttcaccacagttagttgttgcttatgcattagctggaacggttgatattgatttacagaatgaacctattggtaaaggtaatgacggtgaagatgtatatttgaaagatatttggccatcaattaaagaagtttcagataccgttgatagtgttgtaacacctgaattatttattgaagaatataataacgtatacaataacaacgaattatggaatgagattgatgtaactgatcaacctctatatgactttgatcctaattcaacatacattcaaaatccatcattcttccaaggattatctaaagaaccgggtacgattgttccattaaatggtttacgtgttatgggtaaattcggtgattctgtgacaactgaccacatctctccagcaggtgcaattggtaaagatacgccagctggtaaatatttacaagatcatcaagtgcctattcgtgaatttaattcatatggttcaagacgtggtaatcacgaagtaatggttcgaggtacgtttgctaatatacgtattaaaaaccaattagcgccaggtactgaaggtggttttacaacttattggccaacaaatgaagtaatgcctatctttgatgctgcaatgaaatataaagaagatggtacaggtttagttgtattagctggtaacgattatggtatgggttcatctcgtgactgggcagcaaaaggtacaaacttattaggtgttaaaacagttattgcacaaagttatgaacgtatccatcgttcaaatttagttatgatgggtgtattaccattagagtttaaaaaaggtgaatcagctgattctcttggtctagatggtacagaagaaatttctgttaatattgatgaaaatgttcaaccacatgactacgtcaaagttactgctaagaagcaagatggtgatttggtagaatttgacgctatggttcgttttgactcacttgttgaaatggattactatcgtcacggtggaattttacaaatggttttaagaaataaattagcgcaataaaaaatagatatcagagtaaaattttaatcggtatttgaggcactttgatagtgctcaaaaatacttctataaactttatgatataataggtcggttcaaaacctttgtgttcttggccggcctcttcttgtattttatgttagaatgagatataaagttaaactgaaagaaggcttaaaatgatatatagtattacagaaatagaagcgcgttatgctgaaactgataagatgggtgtaatttatcacgggaattatgcaacttggtttgaagttgcgcggttggattatatatcgaagttaggttttagttatgctgatatggaaaaacaaggaatcatttcacctgtgactgacctcaatgtcaattataaaaagtctattttttatccagaaaaagttaaagttaaaacttgggttgaaaaatattcgagattacgttcagtgtataaatatgagatttttaatgaaaaaggtgaacttgcaactacaggttccacagaattgatttgcattaaagaagatacttttaagcctatacggttggatcgttatttcccagattggcatgaagcttatagtaaagtgcaaacgctcaataatgaagggaaaacagtagagataatggatggtattgattctttataagttactgtaaatgtttggagaggcaatattaacaattaatctataaaaaatagccaatacgttaacattaatgtaattagcgtgaagataagctaatatatagcaaaaacgaacttgttcatacaacatcagatgtgctaaaccaaagtacaacttccgaggttcaggacacatcagaatgtgtaaacaagttcgttttattttagttattttgtggaataagaaatttcatcttcgtgatcaactacatttacaataatgtggtcatcttcaaagtaccacaaatctttttccgctacgacaacatttaaatcgtcatattgttgttcatagccaatatcaacatcttcctttggttcaactgtaaaagcaggactaaatccttgcttgagttggaattcgccaccatatcttacaaaaaacacgagcactttattattttcaggcaactcaagttcatttttaaaccaagttactgctgcatcagtaagttctatttgcataacaatgacctcctatatttattacagaatgggagtgggccaacttgtattatttgtggaatttcttatcgaaattctctgtgttggagcccaccccaacctgctcattattgtaagctgaatttccataagcttctatgttgggacccccgaccagaattgaaaaaacctagttataagcgcattttgttcggttaactacagctaatataacattgtggagcctatgacattgatttatgtctcggtctcaaatgttcttgtaaaaaaactaagtatagttgaattttaagttaaaaaaattgtttttgcaaaaataaaataatccatcaactgcaaaaaaatatgcaatgatggactaatgtcaaaaaattgttacatccattttattttaggttcttcgcctctaaaaatccttgcgatattagagcgatgtctaattatcaatatgattgaaactaagaaactaacgactaataaaatatagtcttgaatgataagcgagccaatcacacagcaaattgctgcaacgatacttgctaaagaaacatatttaaaaatcttcaatacaataaagaagataattgcaagtattagtaaaagtatcggattgactcccaagacgacacctgcactagttgcaacagctttgccaccttggaattttaaataaacaggataaacgtgtccaagtatagcgaataagccaacaattaaaccatttgtaaaaaaagtactaatagggccatctgcgtgaactggtaaccataaagggaagaaaacagttatgaaccctttgaaaatatctagaaatgttaccaagaatcctgcaggacgacctaatactctaaagctattagtagcgccagtattaccactaccaaattgtctaatatcttttttgaaaaataattttccaattacgaatccacttgggaaagcgccgataagataacttagtagtaacatgacgattatcatcataaatattacacatcctttaatatcttaggactattttatcatattcgtttaaattacggctaaaaattttaaaaacggggattaatatatggaattaagctatgaaagttaattgatacttgcattttacgctgatttatataagaataactattgtatagttttaaaaacgaacgtacgtttgcaggaggcgaaatcattggcaatgaataaacaaaataattattcagatgattcaatacaggttttagaggggttagaagcagttcgtaaaagacctggtatgtatattggatcaactgataaacggggattacatcatctagtatatgaaattgtcgataactccgtcgatgaagtattgaatggttacggtaacgaaatagatgtaacaattaataaagatggtagtatttctatagaagataatggacgtggtatgccaacaggtatacataaatcaggtaaaccgacagtcgaagttatctttactgttttacatgcaggaggtaaatttggacaaggcggctataaaacttcaggtggtcttcacggtgttggtgcttcagttgtaaatgcattgagtgaatggcttgaagttgaaatccatcgagatggtaatatatatcatcaaagttttaaaaacggtggttcgccatcttctggtttagtgaaaaaaggtaaaactaagaaaacaggtaccaaagtaacatttaaacctgatgacacaatttttaaagcatctacatcatttaattttgatgttttaagcgaacgactacaagagtctgcgttcttattgaaaaatttaaaaataacgcttaatgatttacgcagtggtaaagagcgtcaagagtattaccattatgaagaaggaatcaaagagtttgttagttatgtcaatgaaggaaaagaagttttgcatgacgtggctacattttcaggtgaagcaaatggtatagaggtagacgtagctttccaatataatgatcaatattcagaaagtattttaagttttgtaaataatgtacgtactaaagatggtggtacacatgaagttggttttaaaacagcaatgacacgtgtatttaatgattatgcacgtcgtattaatgaacttaaaacaaaagataaaaacttagatggtaatgatattcgtgaaggtttaacagctgttgtgtctgtacgtattccagaagaattattacaatttgaaggacaaacgaaatctaaattgggtacttctgaagctagaagtgctgttgattcagttgttgcagacaaattgccattctatttagaagaaaaaggacaattgtctaaatcacttgtgaaaaaagcgattaaagcacaacaagcaagggaagctgcacgtaaagctcgtgaagatgctcgttcaggtaagaaaaacaagcgtaaagacactttgctatctggtaaattaacacctgcacaaagtaaaaacactgaaaaaaatgaattgtatttagtcgaaggtgattctgcgggaggttcagcaaaacttggacgagaccgcaaattccaagcgatattaccattacgtggtaaggtaattaatacagagaaagcacgtctagaagatatttttaaaaatgaagaaattaatacaattatccacacaatcggggcaggcgttggtactgactttaaaattgaagatagtaattataatcgtgtaattattatgactgatgctgatactgatggtgcacatattcaagtgctattgttaacattcttcttcaaatatatgaaaccgcttgttcaagcaggtcgtgtatttattgctttacctccactttataaattggaaaaaggtaaaggcaaaacaaagcgagttgaatacgcttggacagacgaagagcttaataaattgcaaaaagaacttggtaaaggcttcacgttacaacgttacaaaggtttgggtgagatgaaccctgaacaattatgggaaacgacgatgaacccagaaacacgaactttaattcgtgtacaagttgaagatgaagtgcgttcatctaaacgtgtaacaacattaatgggtgacaaagtacaacctagacgtgaatggattgaaaagcacgttgagtttggtatgcaagaggaccaaagtattttagataattctgaagtacaagtgcttgaaaatgatcaatttgatgaggaggaaatctagtgagtgaaataattcaagatttatcacttgaagatgttttaggtgatcgctttggaagatatagtaaatatattattcaagagcgtgcattgccagatgttcgtgatggtttaaaaccagtacaacgtcgtattttatatgcaatgtattcaagtggtaatacacacgataaaaatttccgtaaaagtgcgaaaacagtcggtgatgttattggtcaatatcatccacatggagactcctcagtgtacgaagcaatggtccgtttaagtcaagactggaagttacgacatgtcttaatagaaatgcatggtaataatggtagtatcgataatgatccgccagcggcaatgcgttacactgaagctaagttaagcttactagctgaagagttattacgtgatattaataaagagacagtttctttcattccaaactatgatgatacgacactcgagccaatggtattgccatcacgatttcctaacttactagtgaatggttctacaggtatatctgcaggttacgcgacagatataccaccacataatttagctgaagtgattcaagcaacacttaaatatattgataatccggatattacagtcaatcaattaatgaaatatattaaaggtcctgattttccaactggtggtattattcaaggtattgatggtattaaaaaagcttatgaatcaggtaaaggtagaattatagttcgttctaaagttgaagaagaaactttacgcaatggacgtaaacagttaattattactgaaattccatatgaagtgaacaaaagtagcttagtaaaacgtatcgatgaattacgtgctgacaaaaaagtcgatggtatcgttgaagtacgtgatgaaactgatagaactggtttacgaatagcaattgaattgaaaaaagatgtgaacagtgaatcaatcaaaaattatctttataaaaactctgatttacagatttcatataatttcaacatggtcgctattagtgatggtcgtccaaaattgatgggtattcgtcaaattatagatagttatttgaatcaccaaattgaggttgttgcaaatagaacgaagtttgaattagataatgcagaaaaacgtatgcatatcgttgaaggtttgattaaagcgttgtcaattttagataaagtaatcgaattgattcgtagctctaaaaacaagcgtgacgctaaagaaaaccttatcgaagtatacgagttcacagaagaacaggctgaagcaattgtaatgttacagttatatcgtttaacaaatactgacatagttgcgcttgaaggtgaacataaagaacttgaagcattaatcaaacaattacgtcatattcttgataaccatgatgcattattgaatgtcataaaagaagaattgaatgaaattaaaaagaaattcaaatctgaacgactgtctttaattgaagcagaaattgaagaaattaaaattgacaaagaagttatggtgcctagtgaagaagttattttaagtatgacacgtcatggatatattaaacgtacttctattcgtagctttaatgctagcggtgttgaagatattggtttaaaagatggtgacagtttacttaaacatcaagaagtaaatacgcaagataccgtactagtatttacaaataaaggtcgttatctatttataccggttcataaattagcagatattcgttggaaagaattgggacaacatgtatcacaaatagttcctatcgaagaagatgaagtggttattaatgtctttaatgaaaaggactttaatacagatgcattttatgtttttgcgactcaaaatggcatgattaagaaaagtacagtgcctctatttaaaacaacgcgttttaataaacctttaattgctactaaagttaaagaaaatgatgatttgattagtgttatgcgctttgaaaaagatcaattaattaccgtcattactaataaaggtatgtcattaacgtataatacaagtgaactatcagataccggattaagggcagctggtgttaaatcaataaatcttaaagctgaagatttcgttgttatgacagaaggtgtttctgaaaatgatactatattgatggccacacaacgcggctcgttaaaacgtattagttttaaaatcttacaagttgctaaaagagcacaacgtggaataactttattaaaagaattaaagaaaaatccacatcgtattgtagctgcacatgtagtgacaggtgaacatagtcaatatacattatattcaaaatcaaatgaagaacatggtttaattaatgatattcataaatctgaacaatatacaaatggctcattcattgtagatacagatgattttggtgaagtaatagacatgtatattagctaaaaactatatgcaatcacgaaattaaatgataaaatacagtaatgttaaattttgactaaattcaagggatttatattaaatgctgaccaagtacttatcgttaaattagcgatatactttgaccaaactaatataaatctcttgtattgtataagaaatgatgatgtatctctatatttactgaaggttcaattcggtctaattttatagaaggtacatgattcatgtagaggatgcgaggggtttattttgaaagatttcgatagtttaattcctggatggtttaaagaatttgtccatgttggtaccgatttaatatggtctcaatatttaattggtctattattgacagctggattcttctttacaattagttctaaattcgtccaattacgaatgttacctgaaatgtttagagctttagtagaacgtccagaaactttagaagatggtaagaagggtatttcgccattccaagcatttgcgattagtgctggttcgagagttggtactggtaatattgctggtgttgcgactgcgattgttttaggcggtccaggtgcagtgttttggatgtgggttattgcatttataggtgcagcgagtgcatttatagaagcgactttggctcaggtttataaagtacatgataaagatggtggattccgtggtggtccagcttactatattactaaaggtttaaatcaaaaatggctaggtatcgtatttgcgattttaattacaattacatttgcatttgtatttaacacagtgcaatctaatacaattgcggagtcgttaaatacgcaatataatattagtccagtaatcacaggtattattttagcaatcgtaacagctattattatatttggtggtgtacgtagtattgctacgttatcttcgttaattgtaccgattatggctatcatttacattggtatggttttagtaatattgctatttaatttagatcaaattgttcctatgataggtacgattattaaaagtgcatttggtatcgaacaagtaactggtggcgctgtaggtgctgcggttcttcaaggtatcaaacgtggtttattctctaacgaagctggtatgggttctgcgccgaatgcagcggcaactgctgccgtaccacaccctgttaagcaaggtttaatccaatcattaggtgtgttctttgatacaatgttggtttgtacagcaactgcaatcatgattttactatattcaggactgaaatttggtgataacgcacctcaaggtgttgcagttactcaatcagcacttaatgagcatttaggttctgctggaggtattttcttaacaatagcagttacactgtttgcattttcatctgtggtaggtaattactattacggtcaatctaatattgaatttttatcaacaaaccgtgtaatattatttatctttagatgtcttgttgtagtacttgtctttgtcggtgcagttgtaaaaacagaaacagtatggaatacggcagacttatttatgggcttaatggcaattgtaaacattatttccattataggactgtccaatgtagcttttgcattgatgaaagattatcaaaagcagaaaaaagaaggcaagaaccctgtctttaaacctgaaaacttagaaattaacttatttggaattagtgcttggggcgctaacaaatataagaactctgataaataaatatttttaatgtaacgattcattatataaaaatcaaataaaccctgaggttttcaaattaaagcgaaaatctcagggttttaaatttgtactcaataatcatctgtatcattacactagttaatctaagatttgattatatattaatatagtaaggttgagatttatttcctccattggtgtgcaaagactataccattgataagacatattgttggatagatgaatataaatttattttagctttgcacaatttaatagtacgttttagtttgtattgagtattaattcagataatatataaataaatagaattatttgtaaatatgggagtcagatttttttattatagttattctactttgagaggcatcgaaattaaattaagatatatcatataggataggcgtgtaatagaacacaagtatttaaattattatactttcaagttagacatttccgatatataatcttaataatagaaaaataggtgatgataatgggagaatatattgttactaaaacattgaacaacaatgtcgtagtatgtactaataatgatcaagaagttattttaatcggtaaaggtattggttttaacaaaaaagagggaatggcgttaaacgaccaaactattacaatagagaaaatttataaattagagagtgagcaacaaaaagcacattataaaagtttagttgaaatcgctgatgataatgtattacaagtaattattgattcgttgaattttatttctaatactgcgatgaatgttgattcaaaacaacttgtagtttcattaacggatcatattatatttgcttataaacgcttaaaacaaaatcaagttattagcaatccatttgttatggaaactatgcagttatatagtgatgcatatcatattgctaaacaggtgattgatcagttaaatgcagcattagatgtacattttcctgaagatgagataggatttattgcattacatattgcatctaatacagaagatttatctatgcatgagatgaccttgatcaataatgttattaaaaaaggtatagatatcattgaatcagaccttgtgacaactgttgataaggaatcattacaataccaacgttttataaggcacgtacaatttttaattcgccgattaagaagaaaagaatatatacatgcacaagatgattttgtgtctatgattaaaaatcactatccgatttgctataacacagcatataaaattttaactatgatacaaaaacaatttgatgttaatatcagtgagtctgaaattatatatttaacattacacattcatcattttgaagaaaggattaatcaatcctaaattaagtgtattacacgggcgtttcgttactgtaaagggtatttgtatggtatcattgatgttagtaattttacataagtggactgtttttatacaacatcttatgaatattttaagtggtggtgaatctataattgaatgaaaatgaaaagaatataagaaagaattttttaaaatttaccgaatcacggtatatgaagtttgttggtgggaatgatttagtcttctcattaatagcgctagtattgttgggtattgttatttttattttcgaaaaagtatcatatgtttttgatccttttatcatcgtttttaagacgatagcagcacctatcatcgtctctttaattctattctatctatttaacccaatcgtaaatatgatggaacgttatagaataccaagagttgcaggtatttctattatttatctagctgtagtaggtgttattacgttaattgttaatttattgatacctattattggttcgcaagtagatagtttagttaaaaattcaccgcaatatctagaaaaattaattaattctattgataaaatagcaaataatacgtttttctcttcgtattatagtcaaattaatgattggttaaattctttacctaagaaaataccatctatgttaagtgaatttacagatggctttgggtctaaaattgcaacgtttgcagaaacgattgctaatattggcgttgtgattgtcacaacaccatttgtactattctttatgcttaaagatggacatcacttcaaagaattttcaacgaatattatgccaccgaaattccgaaaagattttcatgatctacttgaaaaaatgagtgttcaagttggttcatacattcaaggacaaattatcgtttcattctgtatcggtatactgttgtttatcggttattcggttatcgggttgaaatatagcttagtattagctagtattgcggcagttacaagtgttgtaccatatttagggcctactatagcgatttctccagctattgtaatagctgctataacatcgccgtggatgctcttaaaattagcagtagtatggactttagtacaatttgttgaagggcacttcatttcaccaaatatcatgggtaaaacacttaagattcatccacttacaatcattttcattttactgtgtgcaggcaaattgcttggtattgtaggcgttattttaggtattccgggatatgctattttaaaagtattagttactcatttattccaattatttaaacgtcgatacaatcgtttctatggtaatgatgtaggtgaatatgatattaaagaaagtaataaaatagttgaataagtaataaaaaataccaatgactatatgtttgttggtattttttatggtgcttataatgttgggcagttacatttatgattatcagcacatgtttagcttataaatttttacgaaagtttagccgtttataaagcacatgcataatgaaacgagtatttgccacttgattagtacttcattattatgtcgaaaataaaaataagtggtatttttaatatattaagaagcactcataatcggctgttaattaataatatttttcataagtattgattcatcattttctttatgttaaatatgaatcagtatagataaccatattgttctgtttgagatagaaatattttctatttacttcttaatacagatatcaatatgacaaaagtgttatataaatcaaaggtaaatgatatgctatttttatggtttatatgatatattttgatttataacagaaataattagaattgatgtgaaaaaatgaatcaggaagttaaaaacaaaatattttcaatcttaaaaattacgtttgctacagctttatttatttttgtagcaatcacattgtatcgggagttatctggtattaactttaaagatacgttggttgaatttagtaagattaaccgtatgtccttagtgttactatttattggtggtggggcatcgcttgttattctatcaatgtatgatgtgattttatctagagctttaaaaatggatatatccttaggcaaagttttaagagtaagttatatcatcaatgcattgaatgcgattgtaggtttcggtggctttattggtgcaggcgttagagcaatggtttataaaaactatacgcatgataaaaagaaattagttcactttatatccttaatacttatttcaatgttgacaggtttaagcttattatcattgctaattgtattccatgttttcgatgcatctttaatcttagataagattacatgggtaagatgggtattatatgtagtgtcatttttcttaccattattcattatttattcaatggttagaccacccgataaaaacaatcgttttgtaggattgtactgcactttagtgtcgtgtgttgaatggttagcagctgcagttgtattatatttctgtggtgtaattgttgacgctcatgtatcattcatgtcctttattgcaatatttatcattgctgcattatcaggtttagtcagctttattcctggtggtttcggcgctttcgatttagttgtattactaggatttaaaactttaggtgtccctgaggaaaaagtattattaatgctacttctatatcgttttgcgtactattttgtaccggtaattattgcattaattttatcatcatttgaatttggtacatcagctaagaagtacattgagggatctaaatactttattcctgctaaagatgttacgtcatttttaatgtcttatcaaaaggatattattgctaaaattccatcattatcattagcaattttagtattctttacaagtatgatcttttttgtaaataacttaacgattgtttacgatgctttatatgatggaaatcacttaacgtattatattctattggcaatgcatactagtgcttgtttattacttttactgaatgtagttggtatttataagcaaagtagacgtgccattatctttgctatgatttcaattttattaatcacagtggcgacattcttcacttacgcttcatatattttaataacatggttagctattatttttgttctgcttattgtagctttccgtagagcacgtaggttgaaacgcccagtaagaatgagaaatatagttgcaatgcttttattcagtttatttactttatatgttaaccatatatttattgctggaacgttatatgcattagatatttatacgattgaaatgcatacatctgtattgcgctattacttctggcttacgattttaatcatcgctatcatcataggtatgattgcatggttgtttgattatcaatttagcaaagtacgtatttcttctaaaattgaagattgcgaggagattattaatcagtacggcggtaattatttgagtcacttgatatatagtggtgacaagcagtttttcactaatgaaaataaaacagcatttttaatgtatcgttataaagcaagttcattagtggttcttggagatccgttaggtgatgaaaatgcctttgatgaattgttagaagcattctataattacgctgagtatttaggctatgatgttatattctatcaagttacagatcaacacatgcctttatatcataatttcggtaaccaatttttcaaattaggtgaagaagcaattattgatttaacgcaattttcaacttcaggtaaaaaacgccgtggatttagagcgactttaaataaattcgatgaacttaatatttcgttcgaaattattgaaccaccgttttcaactgaatttataaatgaacttcaacatgtaagtgatttatggctagataatcgtcaggaaatgcatttctctgttggtcaatttaatgaagaatacttatctaaagcgccaattggtgtaatgcgaaatgaagaaaatgaagtaattgcattttgtagtttaatgccaacatactttaatgatgccatttcagtcgatttaattagatggttgccagagttagatttaccattaatggatggtctatacttgcatatgttactttggagtaaagaacaaggttatacaaaatttaatatgggtatggcaacgttatcgaacgttggtcaattgcattattcatatttaagagaacgacttgcaggccgtgtctttgaacatttcaacggtctatatcgtttccaaggattacgtcgttataaatctaaatataatccgaattgggaaccacgctttttagtttatcgtaaagataattcgctttgggaatcactttctaaagtaatgcgtgtaatacgtcacaaataattaaaatccaagtgctaagaggtatacagttatgcctgatgcgcttggattttttggtttctataaagaatgatttataaaaaacggtacagataagaatatttaagtttcctatctgtaccgtattttaatattgaaatgagctaaagttaagtcgcctaacttttattatcagtccaatcagtttcatcaagtataaatgttattgcttatttttgtattcttggcgtattttttgttcttctgcatagcgctctggatttttcttataaaaatcttggtgatagtcttcggctttgtaaaattgtgacgctggtaatatttttgttgcaattgccttatcagcattaatcgtatttttaagctgctcgatataagtctcagcgagttctttttgatgatcattagtgtagaaaatagctgtttgatattgaggaccacggtcttgatattgaccacctgtatctaatgggtcaatgactgagaaaaatatttctaataacttattgtatgagaataatgcaacatcatattgaatttcaacagtttctaaatgaccactcgtacctgattttacttgttcgtaagtaggattttcaatatgtccgcccatatatccagaagttactttttctatgccgtcaaaggtgtcaaatggtttcgtcatacaccaaaagcaacctccggcaaaataagctgtattaatattcatttttgacatcctttcattagaccttagtacgatttattaagaaatcacttgctttttgaattgtttttatataacgttaatatgtgattattatagtacacaaaaatctatttttgaagatataaggtaggtaaatatggataaagaaactaatgacaacgaatatagacgtcaaagtgaacatcgcacttcggcgcctaagcgaaaaaagaagaagaaaattaggaaattacctatcattcttctgattgttgtaattttacttatcgcattagttgtatatattgtacatagttacaatagcggtgtagaatatgccaagaaacatgcgaaagatgttaaagtacatcaatttaatggaccagtaaaaaatgatggtaaaatttctattcttgtactcggtgcagataaagcacaaggtggacaatcaagaacagattctatcatggttgttcaatatgactttatcaataaaaagatgaaaatgatgtctgtcatgcgtgatatttatgcagatattccaggatatggaaaacacaaaattaattcagcatacgctttaggtggtccagagctacttagaaaaacacttgataaaaatttaggaattaatcctgaatattatgcagtagttgattttactggatttgagaaaatgattgatgaattaatgcctgaaggtgtaccaattaatgtcgaaaaagatatgtcgaaaaatattggtgtatctttgaaaaagggtaaccataggttgaatggtaaagaattacttggttatgcaagattccgtcacgaccctgaaggtgacttcggacgcgtgcgacgtcagcaacaagtgatgcaaacattgaaaaaagaaatggttaattttagaacagttgttaaattaccaaaagttgcaggtattttaagaggctatgtgaatacaaacattcctgattcagggattttccaaacaggtttgagttttggtatccgaggtgaaaaagatgttaagtcattgactgtgccaatcaagaactcatacgaagatgtcaatacaaatactgatggtagtgcattacagattaataaaaacacaaataaacaagctattaaagactttttagatgaagattaaaaataaacaaggcgatttctatcatactcagatagaagtcgccttgttcgttttcaaagaattaattggcatgcatcttatgaagaattattgatctgactttcttacgccagccacaccataatggtttggtttcatttcttctataacaacgtgaattgcttgtctatttgcccccgttgttttttctacggcgtcagttacttcgctaactaaattttttaattgttcatccgaacgaccttctaataattttacattgacgattggcatcatccaaacctcctaatcattattaatttgagtatatcatgtaatacttaaaaattcatttgcaaaataacagaacatttgttctaaaatagttgaaatagaacacgtgttcgtatataataagattcaagtaagggaggaataacagtgtataattatcatttattagaagatagggatgttctatgtattgaccaaaaaagtttttttgcgagtgtttcttgtattgaaaaggggctagatccattagaaacaaagctagctgttgttgcagatactaagcgtcagggttctgtaatattggctgcgacacctaaattaaaagaattaggcatcaagacagggtcgcgattgtttgaaataccacatagaaatgatatttacattatcaatccaagtatgcgtaaatatcttaatgtttcagttgctatttctaagattgcattgcgttatattccacctgaagatttacaccaatatagtattgacgaattttttatggatgttactgatagctatcatagatttagttctacagtacatgcattttgcgaaagacttaaacgtgaaatttatgaagaaacaggcatttattgtactgtgggcattggttctaatatgttattaagtaaaattgctatggatgttgaagcgaagcatagtcaaaatggtatagctgaatggcgatatcaagatgtaccaacgaaattatggccaattcagcccttgcgagatttttggggtattaatcgtcgaacagaagccaaattgaataaaagaggaatttttactataggagatttagcgaaatatccatataaatttttaaaaaaagagttcggtattttaggtgttgatatgcatctacatgcgaatgggatagatcagagtaaagtacgtgaaaagcacaagatcagcaatccatcgatatgcaaaagtcaaatattaatgagagattatcattttgatgaagcaaaagtagtaatgcaagagttaattgaagatgttgctagcagagttcgagcaagaaaaaaagtggcaagaacgatacattttgcctttggctatagtgatgaaggcggtgtacataagcaatatactttgaaagatccaacaaacttagaaaaagatatttataaagtagtaatgcatttcgcagataaattatgtaataaacaagcactatatcgtacgctaagtatatctttgagtcaatttattaatgaggatgagcgacagttaagtctgtttgaagatgaataccaacgcaaacgtgacgaatgtctagctaaaacgatagaccaattacatttgaaatacggcaaaggtattgtgtccaaagcagtatcgtttacagaagcaggtacaaaacacggcagattaggtttaatggctggacataaaatgtaatgactatacggtttaagtaatatataactgtgattcgtataaaataagtctctaaagataaatatttcatatatcacaatagattttcacaataatatctaagaatacatggaatttatcaaaagagacttaataattattggatataacaatcaaaatcactcaatgcttgcataccgcgttctcggtcagtagggtttttgaaactaatttttaaagcaccgtatatatcttcgcgtacttctaagattcttaagttgcttatagatatgttatgtaaactcaggatataagtcactttacttatcatacctgattcatccggaatgtctacatatagatcatacgcagtatttagtccacctagttgtttagcgggtagtgcgtcgcgatacgatttagcttgggcaaaaaatgataacaatttttcagaatcattgctttcaattagtctttctaaatcttgaaactgactttttagctgtcgaatcatttctaaaatatacgttttattactcaaggtgatatctttccacatttgtgcattactactagctatacgagtgatatcacgaaaaccaccagctgcaagtttattaactaaatgatgttcttgaccgttcttttgactaacatgaactaaactagatgcaacgatatgaggtaaatgacttacgacgcttgttacgtagtcgtgttcttcagcagtagttacaataaatttagcaagagtaggtgataacagttcttttaacgtgtttgctgcttgctcatttcttggctcattgtagactaaaatataataagcgttttcaaataagtgctttttagcatttagtacaccagatttatgactaccagccattggatgaccactgactaaatgaatattatgctttaataaattgcattcgtgttgctgtatcattgctttagtactaccagtatcagaaacaataacaccaggtttagttggcatatctataagctcgctaagatatttatttgtgatagcaacaggtgttgcataaataattacatcggcttttttaatagcttcactataatttacacatttttcattaataatgccgattgatttagctttatctaactgagaagtatctgcatcgtatgcaataatattagtattagggttatggtattttatattgctagcaagacttccaccaattaatccaagcccaacaaataaaactgttgtcatataaatcaccttatttcgaaattttcagaataataacattgtaaatgagctgttgacacagtgcaatagtaaataaaaatcgataatagcattaatagataaacggagataaatcatctacaataaagagtatagtaacacaatggcaacggaggggtaaatcaatggaaccaatattagaaatgattaaaacattaacaggtattaatagtccttcaggagacacagaagaagcaattcaatttgtcgaaaaatatgcaaaagacttgggttatcaaacaacactaacaaataaaggtgcgttattaataacagtgccaggcaaaaatgatgaagtacaacgctgtattactgctcatgttgatactttaggtgcaatggttaaagaaattaaagaagatggtcgcttagcaatagaattaattggaggattcacgtataacgcgattgagggtgaatattgccaaattaaaactgatgctggtcaaatatatacaggaacaatttgtctgcatgaaacaagtgttcatgtatatagaaataatcatgaaatacctagagatcaaaagcatatggaaataagaattgatgaagtaactacatcagaagaagatacaaagagtttaggtatttcagtaggtgattttgttagctttgatccacgtacagttatcacgtcatcaggttttattaaatctcgtcatttagatgataaagctagcgtagcgatgatactacaattactaaagaaattaaaagaagagcaaataatattaccacatacaacgcaattttatatttctaataacgaagaaataggttacggtgcaaatgcatcaattgattcgaaaatcaaagaatatattgcattagatatgggcgcgttgggagacggtcaagcatcggatgaatatacagtttctatttgtgccaaagatgcttcaggtccatatcataagcaattgaaatcgcacctagttaatctttgcaaaataaataacattccatataaagtagacatatatccatattatggttcagatgcttcagcagctttacatgctggtgcggatatcagacatggtttatttggcgctggcattgaatcatctcatgcaatggaacgaacacatattgattctattaaagcgacagagaaattactatatgcatattgcttatcaccaattgagtaaacaattagtgttgacaaatgtgaacgacctatgtaatataatgaactataaaaataattagaattttctaaagaaatagtagcagatatgaaacgtagcaaatagaaagctaatgggtgatgggaattagcacgccatatcttgtgaattggactttggaaaacaattgaatgagttttgaaagtgaacatgaattatgttaactaaggtggcaccacggtaacgcgtccttacaggtatatgcgttatgtggtgtctttttatttagacaaaatgtagtagttaattaaaggtagcaacagaaagttagtggatgatgtgaactaacaccgagattaatgaaattgggttttgtctgcaacagaaaaattatatatagtaaagagtgaactatgaatatttcgaatattcggttaatttaggtggtaccacgcgtcagcgtcctttatattgataaggatgctggcgcttttttgaaaggagcgtatagaatggatatattttataaaaaaataaaagcaaatgtaacgcccgaagttttagcacaacttcattccaagaagatcattttggaaagtacaaatcaacaacaaactaaaggtcgctattcagttgttatttttgatatttatggcactttaactttagataatgatgtattatcagtaagtactttaaaagaatcgtatcaaatcactgaaagaccgtaccattatttaacgactaaaataaatgaagactaccataatattcaagatgagcaacttaagtcattaccatttatatctggatatgttgggacgtgtagctttgatttagtaagacatgaatttcctaaattgcaatcaatacaattagaagatcacaagcagcacgatgtaaggttatatatggttgaacaagtttatgtatttgaccattacaaagatgagttatatatcatcgcgacgaatcaattttcaaattcaacaaaatcagatcttgagaatcgagttattaagtctatcgaagacttaactaaaatccaaccattcatgcctacacaagattttgattttaaaactaaagaaattcaatcaaacatttctgaagaaagatttatcgaaatgattcagtatttcaaagagaaaataacagaaggggatatgttccaagttgtgccatcaagaatttacaaatatgcgcatcatgctagtcagcatttaaatcaactttcgtttcaactgtatcaaaatttaaaacgacaaaacccaagtccatatatgtattatcttaatatcgatcaaccatatattgtcggtagttctcccgaaagtttcgtaagtgtcaaagatcaaattgtaacaactaatcctattgcaggtacgattcaacgtggtgagacgacacaaatagataatgagaatatgaaacaactacttaatgatccaaaagaatgcagcgaacatcgtatgctagttgatttaggacgtaatgatattcatagagtaagtaaaatcggtacctcaaaaattactaaattaatggttattgaaaaatatgaacatgttatgcatatcgtaagtgaagtcacaggtaaaataaatcaaaatttatcgccaatgacagttattgcgaatttattaccaacaggtaccgtttcaggtgcaccaaaattacgtgcaattgaaagaatatatgaacaatatccacataaacggggcgtttatagtggtggtgttggatacataaattgtaatcataacttagattttgcattagcaattcgaacgatgatgatagatgagcagtatatcaacgtagaagctggttgtggcgttgtatatgattctattcctgaaaaagaactgaatgaaacgaaattgaaagctaaaagcttattggaggtgagcccatgatcttagttgtagataattatgattcctttacatataacctagtggatattgttgctcaacatactgacgtcattgttcaataccctgatgatgataatgtgctgaatcaatcggtggacgctgttattatatctcctggtccagggcatccattagacgatcaacagttaatgaaaatcatatcaacctatcaacacaaacccattttaggtatttgtttaggggctcaggcactgacttgttactacggtggagaagtcattaaaggcgacaaggttatgcacggcaaagttgatacactaaaggttatatcgcatcatcaacatctgttatatcaagatataccagaacagttttcaattatgagatatcattcattaataagtaaccctgacaattttccagaagaattgaaaattactggacgtaccgaagattgtatacagtcatttgagcataaagaaagaccgcattacggtattcagtatcatcctgaatcatttgctacagactatggtgtcaaaataattacaaatttcattaatctagtgaaggaaggatgaaaaccatgacattactaacaagaataaaaactgaaactatattacttgaaagcgacattaaagagctaatcgatatacttatttctcctagtattggaactgatattaaatatgaattacttagttcctattcggagcgagaaatccaacaacaagaattaacatatattgtacgtagcttaattaatacaatgtatccacatcaaccatgttatgaaggggctatgtgtgtgtgcggcacaggtggtgacaagtcaaatagtttcaacatttcaacgactgttgcttttgttgtagcaagtgctggcgtaaaagttataaaacatggtaataaaagtattacctcaaattcaggtagtacggatttgttaaatcaaatgaacatacaaacaacaactgttgatgatacacctaaccaattaaatgaaaaagaccttgtattcattggtgcaactgaatcatatccaatcatgaagtatatgcaaccagttagaaaaatgattggaaagcctacaatattaaaccttgtgggtccattaattaatccatatcacttaacgtatcaaatggtaggcgtctttgatcctacaaagttaaagttagttgctaaaacgattaaagatttaggtagaaaacgtgcaatcgttttacatggtgcaaatggtatggatgaagcaacactatctggtgataatttgatatatgaattgactgaagatggagaaatcaaaaattacacattaaatgcgactgattatggtttgaaacatgcgccgaatagtgattttaaaggcggttcacctgaagaaaatttagcaatcacactgaatatcttgaatggtaaagatcagtcaagtcgacgtgatgttgtcttactaaatgtgggtttaagcctttatgttgcagagaaagtggataccatcgcagaaggcatagaacttgcaactacattgattgataatggtgaagcattgaaaaaataccatcaaatgagaggtgaataatatgacgattttatcagaaattgttaaatataaacagtcacttttacaaaatggctattatcaagacaaacttaataccttaaaaagtgtgaagattcagaataaaaaatcttttataaatgcaattgagaaagaaccaaagctagcaattattgcagaaatcaaatcgaagagtcctacagttaatgacttacctgaacgagatttatcgcaacaaatctcagattatgaaaagtatggtgctaatgctgtatccattttgactgatgaaaagtactttggtggtagttttgaaagattacaagcattgacgacaaaaacaacattacccgtattatgcaaagactttattatagacccgcttcaaattgatgttgctaaacaagctggtgcatctatgattttattgatcgttaacatcttatctgataaacaattgaaagatttatataactacgctatatcgcaaaatctagaagtgttaattgaagtacatgatcgccatgaattagaacgtgcctataaggttaatgctaaattgattggtgtaaataacagggacttaaaacgatttgtcacaaatgtggaacatacaaatactattttagaaaataaaaaaccaaatcattattatatttctgaaagtggtattcacgatgcatctgatgtaagaaaaatcttgcatagtggtatcgatggcttactaataggtgaggcgcttatgcgttgtgacaatctatctgaatttttaccacaactgaaaatgcaaaaggtgaagtcatgatgaaattgaaattttgtggctttacatcaataaaggatgttacagcggccagtcaattacctattgatgcgataggtttcatccattatgaaaaaagtaaaaggcatcaaacaattacccaaataaaaaagttagcgtctgctgttccaaatcatatcgataaagtatgtgtcatggtaaatcctgatttaacaacaattgaacacgtattaagcaatacgtcaattaacacaatacagttacacggcacagaatctattgattttatacaggaaattaaaaagaaatattcaagcattaaaatcactaaagctttagctgcagatgaaaacataatccaaaacataaataaatataaagggttcgtagatttatttattatcgacacaccctcagtgtcgtatggtggtaccggtcaaacatatgactggactattttgaagcacataaaagacataccttacttgatagcaggaggcattaactctgaaaatattcaaacagttaatcaacttaaattatcacatcaaggttttgatcttgcatcaggtatagaagtaaatgggcgaaaagatatagaaaaaatgacagcaattgtaaatattgtgaaaggagatagagacaatgaataaacaaatacaaacggaagcagatgaattaggtttctttggtgaatacggagggcaatatgttccagaaacattaatgccagcaattattgagttgaaaaaagcttataaagaggcaaaagcagacccagagtttcaaagagaactggaatactatttatcagagtatgtaggacgcgcgacgccacttacatatgctgcatcatatactgaaagcctaggtggcgctaaaatatatttgaaacgagaggatctaaatcatacaggcgcccataaaattaataatgcgttaggtcaagcgttgcttgctaaaagaatgggcaagaagaagcttgttgctgaaactggtgcgggtcaacatggtgtagctagtgctacggttgctgcattatttgatatggaacttgttgtctttatgggaagtgaagatattaaaagacaacaacttaatgtatttagaatggaattacttggtgcaaaggttgtggcagttgaagatggtcaagggactttatcggatgcagttaataaagcattgcaatattgggtaagtcatgtagatgatacacattatttattaggttctgcattaggtccagacccgttcccaacgattgttagagattttcagagtgtgattggtaaagaaataaaatcacaaatattgaagaaagaaggtcgacttccggatgcaattgtagcatgtatcggtggtggctcaaatgcaatcggtacattttatccatttattaaagatgatgttgcattatacggtgttgaagccgcaggtcaaggcgaggatactgataaacatgcacttgcaattggcaaaggatcacctggcgtattacatggtactaaaatgtatttaattcaagatgaaggtgggcaagtgcaactagcacattctatttcagcaggacttgattatcctggtattgggccagaacattcttattaccacgatattggtagagtaacttttgaaaatgcaagtgatacacaagcaatgaatgctttaatcaactttacaaaacatgaaggtattatacctgcaattgaaagtgcacatgcactgagttatgttgaaagactagcgcctacgatgtcggaagaagatattattgtagtaactatttctggacgtggcgataaagatatggaaacaattagacaatatatggcagagcgaggtcttgcaaatgactaaattatttataccttatattatgggcaataaagatttgattgaaaatgcaacattgttgagtgaaaatggtgcagatataattgaaattggagtacctttctctgatccggttgctgatggtccagttatcatggaagcaggtcaacaagcgattaaacaaggcatcacgatagattatattttcaatcaattagaaaaacatggtgatcaaattaagtgtaactatgtattaatgacgtattataatattatttgtcattatggagaacaagcgttttttgaaaaatgtcgagatactggtgtctacggcttaattattcctgatttaccatatgaattatcgcagcgtttaaaacaacaatttagtcactatggcgtcaaaatcatatcgttagttgcgatgactactgatgacaaacgtataaaagatatcgtatcccatgcggaaggctttatttatactgtgacgatgaatgcgacaacagggcaaaacggtgcgtttcatccagaattaaaacgaaaaattgagtcaattaaagcgatagccaatgtgccagttgtcgcaggatttggtataagaacaccacaacatgttgcagatataaaagaggttgcagatggcatcgtcattggtagcgaaatcgttaagcgatttaaatctaacacgcgtgaggaaatcattaaatatttacaatctatccaacaaacattgaataattaagtttacttgatttaaaaaaattagtcgaatactgtttgaaaaattgaaaaacggtgaattataaaattgaatagaaatgatacaaaagtaatatgagcaaacctaaacgttcatattactttttttgaaattgtatgcaaaaatctaaatattactataaaagtatacgcaattaaagcgtttatgttttagttttaacattaactattgtatacttatttagattagatttattatttttgacatttgcagaggggaaatagaaaaactgcaaatacggaaatgaaattaattaacgagagacaaataggagtaatgataatgaagtttacaaatttaacagctaaagagtttggtgcctttacagatagcatgccatacagtcatttcacgcaaactgttggccactatgagttaaagcttgctgaaggttatgaaacacatttagtgggaataaaaaacaataataacgaggtcattgcagcttgcttacttactgctgtacctgttatgaaagtgttcaagtatttttattcaaatcgcggtccagtgatcgattatgaaaatcaagaactcgtacactttttctttaatgaattatcaaaatatgttaaaaaacatcgttgtctatacctacatatcgatccatatttaccatatcaatacttgaatcatgatggcgagattacaggtaatgctggtaatgattggttctttgataaaatgagtaacttaggatttgaacatactggattccataaaggatttgatcctgtgctacaaattcgttatcactcagtgttagatttaaaagataaaacagcagatgacatcattaaaaatatggatggacttagaaaaagaaacacgaaaaaagttaaaaagaatggtgttaaagtaagatttttatctgaagaagaactaccaatttttagatcatttatggaagatacgtcagaatcaaaagcttttgctgatcgtgatgacaaattttactacaatcgcttaaaatattacaaagaccgtgtgttagtacctttagcgtatatcaactttgatgaatatattaaagaactaaacgaagagcgtgatattttaaataaagatttaaataaagcgttaaaggatattgaaaaacgtcctgaaaataaaaaagcacacaacaagcgagataacttacaacaacaacttgatgctaatgagcaaaagattgaagaaggtaaacgtctacaagaagaacatggtaatgaattacctatctctgctggtttcttctttatcaatccatttgaagttgtttattatgctggtggtacatcaaatgcattccgtcattttgccggaagttatgcagtgcaatgggaaatgattaattatgcattaaatcatggcattgaccgttataatttctatggtgttagtggtaaatttacagaagatgctgaagatgctggtgtagttaaattcaaaaaaggttacaatgctgaaattattgaatatgttggtgactttattaaaccaattaataaacctgtttacgcagcatataccgcacttaaaaaagttaaagacagaattttttaggaagggaattatcaaaacatgaaatttacagagttaactgttaccgaatttgacaactttgtacaaaatccatcattggaaagtcattatttccaagtaaaagaaaatatagttacccgtgagaatgatggctttgaagtagttttattaggtattaaagacgacaataacaaagtaattgcagcaagccttttctctaaaattcctactatgggaagttatgtttactattcgaatcgtggtccagtaatggatttttcagatttaggattagttgattattatttaaaagagttagataaatatttacagcaacatcaatgtttatatgttaaattagatccgtattggttatatcatctatatgataaagatatcgtgccatttgaaggtcgcgagaaaaatgatgccttagtaaacttgtttaaatcgcatggttacgagcatcatggctttacaactgagtatgatacatcaagccaagtacgatggatgggcgtattaaaccttgaaggtaaaacacctgaaacattgaaaaagacatttgatagtcaacgtaaacgtaatattaataaagcgataaactatggtgttaaagttagattccttgaacgtgatgagttcaatcttttcctagatttatatcgtgaaactgaagagcgtgctggatttgtatcaaaaacagatgactatttttacaactttattgacacatatggagataaagtattagtaccattagcatatattgaccttgatgaatatgtgttaaagttgcaacaggaattgaatgacaaagaaaatcgtcgtgatcaaatgatggcgaaagaaaacaaatcagataaacaaatgaagaaaattgcagaattagataagcaaattgatcatgatcagcatgaattattgaatgcaagtgaattgagcaaaacggacggcccaattctaaaccttgcttctggcgtttattttgcaaatgcatatgaagtgaattatttctctgggggttcatcagaaaaatataatcaatttatgggaccatacatgatgcattggtttatgattaactattgcttcgataatggttatgatcgttataatttctatggtttatcaggtgattttacggaaaacagtgaagattatggcgtataccgctttaaacgtggatttaatgtacaaatcgaagaattaataggggatttctacaaaccaattcataaagtgaaatattggttgttcacaacattggataaattacgtaaaaaattaaagaaatagatgtaaatgatgttagggcttatagttattgatactataggctcttttttatatgttttttaataaagcctcgaataatgatatattaaatgacaagtttaacaagtgattgcaataaatataaatatgaattgcacaacctatttgtaaatgattgagttgagtatactttttaattcattcaatatgactcaaaacaagccaatatgtattatatttttggtgaataaaccttagcataacaatttatgtctgattatatatgtgtgtgtttgcaagtgtgtgatatcaaatgtcatatttgtctaattgtaatttataaaatgcatgagcaatgattgctgtaacaaattctagcaaagtattcagtttgtattttagaaataaaaatgatgatagatgtatgatcgatataaaagatttaatatgcaccaaaacgtgagtaattggtttaatgaaacataacatgaatgtaaatttagcttactgacataaacactacacaaacatacagttatataagtccccttatggaatttcacattctagtttacataatatatattataggaagttatatgtgtgtgacgcaaaaggtaccctacatcataatcattatctaatatcgtcacataacttacttatgctataatcatggtattatattgtttggagtgatttgatgagatttgtctttgatattgatggtacgctttgttttgacggccgattaattgaccagactattattgatacattgttacaattacaacatgatggtcatgaacttatatttgcatcagcacgtccgattcgtgatttgttgccagttttaccatcagtatttcatcagcacacattaattggcgcaaatggtgctatgatttcacagcaatcaaagatttctgttatcaaaccaattcatacagatacatatcaccatatcttaaaaataattcaaaagtatgagttagattatattattgatgatgattggaattatgctgcacaacttgacgctgagaacgcgatttttgagcgtttagatccacataagctggccagttgtattgatgttgcaaatatcgacacaccaatcaagatcattttattaaatatagacccggcacaaattacaactatattagacgagctaaataaataccatcaagaattggaaatgattcaccattcaaatgagtataacattgatataacagcgcaaaatattaacaaatatactgcattacaatatatatttgatgcagatgttaaatatatagcatttggtaatgaccacaatgatattgtcatgttacaacatgctagtagtggctatattataggaccatcagaagcatacacacacgcaatattgaaacttgataaaatcaaacacatcaataataatgcacaagctatttgcaaagtcttaaaatcatataaataaaaacacccctatcaaatgataatcattatcaatcgataggggctattttaataatattcgtcctcgaacatttcttcctcttcatctaatccaaataattctgccatttctccatgttcaattaacatgtttaaatatgcatcacggagttcttcttcactcatatcattaatcatttctttaagagaatcaatccacatatttctgcgtaattgatagtcttcttcaacttcgtttaacatcattatatgtttatttgctgcttctggactagctgtaaagagtaatgcaatcatatgtttacatatcactcgtcttccatcagcatgaggacaattacatttggattttctaggatgttccatatcaatataacaacgatatactttgttgccactgccctttacttcagcctcatgctgcgtttctgaaaatgattttaagttaatgacgcattcactttgacaataattaaagcctctttctatagaacgaatacttgcaatatcaagtaatcccattaatgatactcctttttattattatttttaaataaagaaaataaaatcgataagtgtctagattaatatacttaattcatctatattttataacaagtctagaattatcgcattcttaaatagctaatatgaaaatgcttgcactaattcttttgtataagggtgtctatcaacattaaataattcctctattgcaaaatcatcgactatcatgccatccttaagaacgataattctattaactaagcgttgtaacacggataaatcatgagaaataacgataaaatgatttaagttcgtaatcgtttgcgcttttaatatattgattacattttgttcagctataacatctaaatttgaagttatctcatcacatattaaaacgcgaggctgtgctaataacgaacgcatgacattaaatctttgtaattgtccgccactcacttcgcttggtaatttagtcaataattgcgcgtttaactcaaaagtagataaatgttgtaataataattgatcctgagcagtattatcagttagacctctgtaataatataacgcttcttttaatgaggtctcaatcgtccaatcagggttaaagctagttaaagggtgttggaaaatcggtaacacagcattgtcacttaagtaaatctctcctttaacaggtttaaacaagccaagaaccaatgaagcgagcgtacttttaccacagccactttcgcctaaaataccaacattttctccatcaggtatagtaatattgatatcttgtagcaccatctgctttttattataaccaaaagtcacatgttttaactcaatcatagtaatccctctttaattgtgttctatatttaattagacgttcagtatacggatgcaaatgctcatacttgaaatgattaatattacctcgttcaatgatttgaccttcttttaaaacataaatgtactgacaatatttcaatacatgacttaagttatgtgtgataataaataatgtttgaccatgttctaatacaatatgctgtaataaatccatcacttgattaccgttcaaagcatccaatgatgcaactggttcgtctgcaatgattaatttaggctccaacatgagaacgcttgctatgtatacgcgttcaagttggcccccagaaagttggaaactatatttatttaatatatctttgctttgtaaattaacccacgacaaagccttatcaactttggacaaagcctcttctttactacctttataatgcttacgataaatcgcagttaactgtttacctaatttagtatggtcgttaaaactttctgcataattttgagaaatatagccaattgtatgaccataatattgactcaatctactaacattttccccatcaaattggtacgaatcatacgtgcagcttaaatcaaatggtaaatattcaagtaaagctttagcaatcaaactttttccagcgccgctctctccaatcaaggcattaatctgttgactaaaaattttcaaatcaatccctttaataagagatttctcactagtattctttattgttaaattttgtatatcaatgagactcatcatattcaccccgttgtttcagcaatctatctcttagtgcatcaccggttaaattaaaaattaaaatagttatagcaatgactgaagcaggtgcaatcaacataattggatgagacgaaataaaatcacgaccttgttgcaacatagcgccccactctggtgttggcggttgtgcacctaacccaataaatgatagtgaacttatatatagaatgattttaccgaaatcaacgaccatcaaaacgataatagccggtataattttaggtgttaaatgacgtattaatattgttcttgttggtacatgaaataattgtgccatttttatataaggcttattcatttcgctattaactatacttctagtcaaccttgtgtaattcatccattttattaatgtaattgagataactaaattccataaagatggttgaaaaaaacttgctaaagcaatcatgatgataaattctggaatacttagaccaacatcaataaaccttaacactaatcgttcaatccacccttttttatatccggcaaatagacctagtgtaacacctatgacaacgatagctattaatgttaaaacagtaacaaacaatgttgaacgtgcaccgataataattcgggtaaataaatctctcccataatcatcagttcctaataaatgcaaccaactaataggttcaaaagtttgtgataaattgactttggttgcattttcactactgacaaagaattgcagtacaattaccacaaaaataaatgcaacgaatacaaaaaatatcaggttattctttgaaaatattttatgcatgacggtcactactttctgatatcaatggtgtattggttttgatttttggatttcctaattgtaaacgctgcttcggatcaagtaataacgttaataaatcagcaatcgtattgataataacaacgaagaagccaataaataacacgcatccttgaataacaggataatctcgagatttaatactatccattaatagataaccaataccaggtatatcaaataaattttcaatcactacagtaccacctattagactgccaagtgaaatccctagtaatgggataatcggcaaaattgttggttttagtaaatcatgaattaaaatataacgttcattcataccgcgtaatcttgatgcttgtacgatattactttgcaataacatcaataaattagaacgcactaaacgaatgatgtatgcacacatacctaaagatagcgtgattacaggtaatataaactgacttagtataacgctatctatattcattaaatttgtgacaataaataataaaataataccgataaagaacgctggtaaactaatcgatagtgttgagatcactctaatcactttatccgtccacttatgaaatcgtttggctgctataatgccgagcggtatagatatgcataacgacactactaatgttgaaaatgatatgagtaatgttatgggtgcatagttgaataatatctgtgttaccggttcttttgattcaaaactttttcctaaattaaaatgtaataaatgattcatccaatgccaccactgtaccaataaagaatcatttaatcccaatttatctttggttgcatttatttgttccgtcgacacttgtgctacatcaagatgtaatattttatcaacaggattgcctggtgataatttcattaaaatgaatgtaagtgtagaaataacaaataaaacaactatcatttgcatcagtctatacaacatagactttattatgaacataatagtccccctccttgtgtaagttactaacactttctttttacatgagaatggcgcatgtatatgcaacttacatattaagaaccaacgttcattatagtattatccataaagaaattgaagtatatttaattttttaacaaaatcattataaaatataatattttgaatcaagtcaaccatgtaaaatataaaaaagtcaaaacaaaaacaactatagcactgtattccatctctttcgaaataattgttactgcagtgtaacttaaaagtcgatgattttgtgcatatagttgtcgaatattattttttatctttacggcgaagttcagcgccctcatagccgtatttttcaatttgcttttctaatttacgcgcttttctttctttacgccaatttctagtaaaataccataatagaaaactaattaataaactcataatcgctaaaaatgcagcgtatcctaataatggttgatattttatatcttgaaaatttggaataaaaaatgcaagcacacctaatataacaaatgtaattactgcagatacaaaccatttatttaaaactaagcaacagaatattgttaataaaatcattattaatgttgtgatccataaataattaggcatatcgaataatgtcatattcattctccttttatttcattactttccttgtatacattttattataaatttttaaaaacttaaacaatagcagtcagtttcaagcaatattctatctactattagaaaaatcattgttccttgcgacatggaaatcgtaacattatcgtttaggagacaaaattatgtataatgaatgtattataccaaaggagtgattatatgtctcaaggtttacctttaagagaagatgttcctgtttcagaaacatgggatttagtagacttatttaaagatgatcaacaatattatgaaagtattgacgctctagtacaacaagcaaatcaatttcatcatacatatgcaacaacattaaattcaatcgaacaaattaatactgctttagctgaattagaaaatattttaattgccttagatcgcttaagtaattatgcagaactacgtttaagtgtagatactagtaatatcgaggcacaagtattgagcgctaaattatctactacatacggtaaaattgttagccaattatcatttgtagagtcagaaatacttgaattaccagaagaaatacttcaacaattagaagaatcatgtccatatcaacactatattaaacagttaataaaacaaaagccattccaattatctgcgtcggtagaacaagtattagcaactttatcacctacgctaaacagtccttacgatttatacggcacgacaaaaatgctagatattacattcgattcatttgaacatgatggtacaacgtaccctgtcgactatgctacgtttgaaaatgattatgaagataataaagatcctgagtttagacgtaaaagtttcaaatcgtttagcgatgggattcgaaaatatcagcatactaccgcggctacatataatatgcaagtacaacaagaaaaaattgaagctgatttacgtggatttgaatcagtcatcgattatttattacatagtcaagaagtaacgcgtgatatgtttgaccgtcaaatcgatatgattatgcgtgacttggcaccagttatgcagaaatatgctaaacttttacaacgtattcacggattagataacatgcgttttgaagacttgaagatttctgtagaccctgattatgaaccagagatttcaattgaagactcaaaaaattatattttcggtgcgttaagtgttttaggtgatgactatacaaacatgttacgtgaagcatacgatcagcgatggattgattttgcacaaaataaaggtaaagatacaggcgcattttgtgcaagtccatactttacacattcatatgtgtttatttcttggactggtaaaatggctgaagcatttgtcttagcacatgaattaggtcatgcaggtcattttacattagctcaaaaacatcaaccatatcttgaatcagaagcatcaatgtactttgttgaagccccttctacaatgaatgaaatgttgatggccaattatttatttaacacaagtgataatccaagatttaagcgttgggttattggctcaattttatctagaacatattatcataatatggttacccatttattagaagctgcttatcaacgtgaagtgtatcacaaagtagatcaaggtgaatctttaaatgcgccgacattaaatgaaataatgctaaatgtttataaacaattttttggagatgcagtagacatgactgagggtgctgaattaacatggatgcgtcaacctcattactatatgggattatattcgtatacgtattctgctggcttaacaatcggaactgtcgtttctcaaaagattaaaaatgaaggccaaccagctgttgatgcttggttagaaacattgaaaaaaggtggtagtgtatcacctgtcgaacttgcaaacattgcaggtgtagacattactacagaacagccacttaaatctacaattcaatatatttctgatttagtcgatgaagttgaaaaattaacagatgaaattgagcaagcaaataactaagatgcgagacaatttatagtagaacaatataaaccaagattttcacattactaattgtgagaatcttggtttttttgagggtttatgaataatagaaatatatatttatcgtaagggattttatagtaataactttaagttattgttcgtaatgtgtacctgttaaataaaaataaacactttcagcgatgttaataatatgatcaccaatacgttctaaatgtcttgctgctaaatgagcttgtgcagcgacaaatggatcgttatcaataagatacgttgcgttaataatatgactatataagtcatcgatatcttcatcacgctcaattatttctcttattaatacggtatctttctttttaaatgcttgatctaagtcctttaacattaacatagctaatttacccattgtctttaaacgggttaacacataatcatctgtaatctttgtacgcaatcgaatattggcaatactcgaggcattatctcctattctttctaaatcggaggcgatttttaatgaagaaatcatcatacgcaaatcactcgcaatgggctgttgctttgtaattaacatgataactcgctcattaatatcataatttaattgattgatatgtttatcgtttttaactgtttgtcgtgcaaagcctctatcgtcaatacttaatgattttataccattttcaatactcacatagacatttgcacctaaccgacgtaattcttttattaaatcatcaagttgctcctgatatcgttgtctaattattgccattatatatcaaccaaaccttcctgaaatataatcttctgttttcttgtttgatgggttagagaaaattttatcagtatcatcatattcattgacataaccatttaagaaaaatgcagttttatctgatacacgagctgcttgttgcatattatgtgtaaccataataattgtatacttttcttttagttcttgaaccaactcttctactcttaatgttgagattggatctaatgctgatgtcggttcatccattaaaatgacttcaggttcaattgctaaacaacgcgcgatacaaacacgttgttgttgcccaccggataaactatatgcatttgtgtgcaacctatcctttaattcatcccaaattgcagcgccacgtaatgatttctcaacgatttcatcaagaacttttttatttttaataccgtgaatctttggaccgtaagtaatattatcgtatattgattttggaaatggattaggttgttgaaagaccatgcccacatttgtacgtaattgttctttagaatatttttgatcaaaaatgtcttgatctcgatataatattttaccagctgttttcacagaaggtactaactcaaccattcgattcaaagttttaatatatgttgatttgccacaaccagatggacctataatggcagtaatttggttttcataaatatctaaattaatattttgtaatgcatgattttcgccataccataagtctaaattttgtgttgaatatataacagaatgtgagtttgtatcatctggtgttttatgatgactttgtgagacatcaaacgtatgactttgagatatttgtttagtttgtgcaagtgtttgcgccatatttaaaactccctttttaatagataaatgagattgattgtttaaattagaattttttactaaatttgttacgtaaaataatcgcaacgccattcattaagattaagataactagtaaaacgataatgcctgccgatgcaacattctggaattcttcttgaggcattttcgcccaagtaaatatttggataggtaatgctgaaaattgatccaatatacttctaggtgttgccaataatatagtcggtataccgattagcacaagtggcgctgtttctcccagtgctcttgaaagagacaaaatgaatccagttaaaataccaggtaacgctgctggtaagacaacacgtcttatcgtttgccatttattagcacctaagccgtaagaagcttcgcgtactgagttaggtacagctctaattgcttcctgacttgaaacaataataattggtaatatcagtaaggtcattgttagcgctgctgccaatatactgttacccattttcaaggcttcaatccctgcaccaccaacgaacaaagtataacctaataacccaaatacaactgatggtacaccagctaaattggaaatactgattttaacaaactgagtaaatttgttgtttttcgcatattcttctaagtatatagctgtacctattcctaggatgattgataatggaatgatacttaacattaaccaaagtgaaccgattaacgcgcctttaacgccagccatagatggtgttgaagaagaaaaattagtgaaaaactgtaaatttaaatgacttacccctttaatcaatgtttgagttaacaacgcaataagtacgacaagtcctaataatgtacatgctaaaaatatgagtttgaacactttatttttaaccgttctggatgataaatgtttttggacaagttgttgatcgacgagtgattgtctattattatctgtcgtttccatattaatactcctccctaaaacgcttagaaatccactgagaaagtaaattcatgattaaggtaaagataaatagtgtgaaccctacagcataaatactgtaataaatatttgatccaaatgttgcatcacctgtcgctatctcaacaatatatccagtcattgtttgaatcgaacttgttaaacttaatgaagctgttggcgaactacctgccgctaatgatacaatcatcgtttctccaattgctcttgaaatcgcgagaacgattgaagctacaatacctgatgttgctgcgggaagtacgactttagttgctacttctaatttagttgctccaagtccataggcaccttctcgaattttatttggtacagatgccattgcatcctcactcaaacttgtgatgagagggacaatcataataccgacaactaagccgggacttatagcattaaactctccaagacctggtatgaaagatcttaatactggtgtaacaaaggttaatgcaaagaaaccaaacacaattgttggtattcctgctaaaatttctaatatcggtttaattatgcgtcgtgcacggtcacttgcatattcacttaaataaattgctgcaccaagcccgactggaactgcaaatatagtcgcaataactgtgatttttaaagtccctattatcaatgcccagataccaaacttagggtctgaaccggtaggattccaagtagtagaaaatagaaattcagttattggaattctggtgaaaaaagtgatggtttctaaaagcaatgtgattaatatacctagtgttgttaaaatggaaatcgctgaaattgcggctaaaataactggtataattttgtcattatgcttcccttttttattattatttttttcgattaaagctttaacattagtagatgaagtcataatcaaacctctttctattactcccaaaataattagatttgtaaaataatgatgaaccactattttaagttgataagcttgtagactaactgaatgtcaaaatcagcgtctcgataaatcaagctttgtactctaaataatgattcaccatcaaaatcatgtttcaagacacatttgaaattgcgtcttattattttttgtcttcagactttttatcatcagatttcttgtcgtctgatttttgatttttatcaataaatgcttttaaatcatctaattgtgatttgtatgttttctctggtgctgctacatatccagcttcttcagctgctttacctttatcttctaagacgaatttgataaattctgacattactttattatctttcaatgctttttcatttacataaatgaataatggtctacttaatgcataagagttatcttgaattgtttttttcgtaggctctgttgctttaccattttcatctttgattttaacttcttttaatttatctttattttgaatgtagaagttatatccaaagtatccgattccctctttgtttttcgttacagaagaaacgatagcatttgtatcagcatttttttctgctttaatatcttctttattcattacttcattttcaaagaagtcataagtaccatgacttgagtttggtgatacagcatttatttttttatctggccatttactattaacatctttccatgttttagcttttccagaataaattgcttttaattgctgtttgtctaattcatctacaaaatcattttctttatttacagcaaccgttacaccatcttgcgcaattttgaattctttgtatttgatattcttatcttgtaatttttgcttctcttcatctttaattggtctagaagcatcagcgaagtcgatatctcctgcaatgaatttttggaaaccagcacctgtaccagcttgtcctgctgagattttagcatccgagtgatcttgagcccatttttcatttaatttctccacaattggtgctactgttgatgagccatcacctttagcttccccttttaaatcactattaccactgccaccattaccgccaccacaagcacctaataatagtgttgcacctaaagctgtagtaccaacaaattgccattttttcattgaaatatcctccctgtatgaacaacaaatagtatttgtattgattacatctttatcttaaccttgaattattaacctcatttttagaaactgtaaatgttacataaaaatttgttaagaaaatgtaaatattaatttttgttaatctaaaaaatattgcttcattagtaaaaataaaatgcttcctgaaaaattatcgaaatttaaatatgtacacaaaaaaaggacagatgaaattaaaaaactacttcatctgtccgacttaatattgaatataaaaaacacgcatcctacgacacgtgtaaaaatgattattcttttgagtcaattcgactccaaccttttttagttaaagtgattttacctgtttctatattaataatcttctgtttatataagtgaccgattgcacgtttgaatgaacctttactcatattgaatacttctttaattgcttcagggcttgatttgtcccagaatggtaattcgccatcatattcaactagtaaatcaaaaatgatttggccatcatcgtctaaacgttcatgcgcaagtggtaaaaatgaaccatttaactcacctttatcgttatgtccgataattctaacttgaacagattcacctaatcttggttccgctttacgttctgattcgtgtacgaaaattttgtaacctgattcgcttaataagaagctaccaattcgtaatacacggtatggtttggcttcaatgacttcatttttcatattatcgtcgtgtacaggtgtaaacatgttttctacgacagattcactcgctaaacgtccatacatatgattctcacggtcaattcgtaatgtaactagcaaatgatcaccaggttgtggccatagtgatttcacttttggtaaatcttcccatggtactaacacttcacggggtaatccaacatctatacgtgccccatcgcgatccgttttaagtactttagcaaagtcatatttatctttcgtaatatcaggcatattttgagttgcaaataattcacctgaacggtttggataaatgaagaaactatattcttcacctacttctaattcatcatcatcgttcatttctgattggtttaactttacgttttcaccgtttggtccttttaaaaggtaagttgagccttgtaaccctactacttcaaggaattctatagaacctactatatctttgtctaatgccatgttattctccttcgattcttgtattctttattattataacatgtgtgagtcattctatcattacaacttatatgaggtcgaaactgtgacgataatatgatataattcttccgttagaatatcgaatgaaaaaaaggagaaaatgcatgttacaagtaactgatgtgagtttacgttttggagatcgtaaactatttgaagatgtaaatattaaatttacagaaggtaattgttatggattaattggtgcgaatggtgcaggtaaatcaacattcttaaaaatattatctggtgaattagattctcaaacaggacatgtttcattagggaaaaatgaacgtctagctgttttaaaacaggaccactatgcttatgaagatgaacgcgtgcttgatgttgtaattaaaggtcacgaacgtctttatgaggttatgaaagaaaaagatgaaatctatatgaagccagatttcagtgatgaaaatggtatccgtgctgctgaacttgaaggtgaatttgcagaaatgaatggttggaatgctgaagctgatgctgctaaccttttatctggtttaggtatcgatccaactttacacgataaaaaaatggctgaattagaaaacaaccaaaaaattaaagtattattagcgcaaagtttattcggtgaaccagacgtactattactggatgagcctactaacggtctcgatattccagcaatcagttggttagaagatttcttaattaactttgataatactgttatcgtagtatcgcatgaccgtcatttcttaaataatgtatgtactcatatcgctgatttagacttcggtaaaattaaagtttatgttggtaactatgatttttggtatcaatctagtcagttagctcaaaagatggctcaagaacaaaacaagaaaaaagaagaaaaaatgaaagagttacaggactttattgctcgtttctcagctaacgcttctaaatctaaacaagcaacaagtcgtaaaaaacaacttgagaaaattgaattagatgatattcaaccatcatcaagaagatatcctttcgttaaattcacgcctgagcgtgagattggtaacgacttattaatcgttcaaaatctttctaaaacaattgacggcgaaaaagtattagataatgtatcattcacaatgaatccaaatgataaagcgattttaattggagatagtgaaattgcaaaaacaacattacttaaaatattagctggcgaaatggaaccagacgaaggttcatttaaatggggtgttactacatcattaagttacttccctaaagataactcagagttctttgaaggtgtaaatatgaatctcgttgattggttaagacaatatgctcctgaagatgaacaaacagaaacatttttacgtggtttcttaggtcgtatgttatttagtggtgaagaagttaagaaaaaagctagtgtgctttcaggtggagaaaaagtacgttgtatgctaagtaaaatgatgttatcaagtgcgaatgtacttttacttgacgaacctactaaccacttagacttagaaagtattactgctgtcaatgatggtcttaaatcatttaaaggttctatcatctttacttcttatgacttcgaatttatcaacacgattgcaaaccgtgttatcgatttaaataaacaaggcggcgtttcaaaagaaattccatatgaagaatacttgcaagaaatcggcgttttaaaataaacataatatgtagaatttcttttcgaaaatctctgtattgaggcccgaccaacttgcacattattgtaagttggcttactgtcaccttctatattgggacttattccgcaacttgtattgtttgtagaaattaggaatccaatttctctatgtgttgcaccgacaaggattgaaaaaagctagctacaaagtcattttcattcagtcaactactgtcaatataacattgcaggacctagggcattgattcatgtccgagactatattcaatttaatagacattaactgggcgtctcgatgctaatatttatagcatcgaggtgtcctttttattttattttttaacacatcagcacagtgaacaccccttctctaaattacaaatacagttatcaccgcattaaaagagtacatttatttaatgtgcatattgagtatgctataagtattttgaattttatttttcaaaaagtctcattatcaccaccttttaaaatataagcaacgctataacttgaattttcaggttattccaaaaaatctaaattatcggtttacattcatatttgtcatatgtataatgaacacataccaatttaataatattttgatgaggcgcatcaatcatgagtaaagtttagattactgtctgctaacagctaaatttgaaagggtgcgatgccgaagcaattataatagcagttataatttgttggactttttggttaagagctgagagtttgtcattatttaaaaataatggagtgcatcacttgtatatagattaagagcaagttcgcattccgaacttgttctttttttattattgtgtgcccttcctaacaattaggaggattatatggtaacaagaagtgtgttgaaatttggcggatcatccgtcagtgattttacaaaaataaaaaggatcgctgaaatgttaaaggagcgagtcaatcaagaggaacaattaattgtcgttgtaagtgctatgggtaacacaacagatcaattaatgacgaatgtatcgaccttgactaaagcaccaaaacaacaagaactggcattattattgacaaccggagagcaacaaactgtatcttatttatcaatggtattaaatgatatcggtgtgaatgccaaagcaatgactggctatcaagcgggtattaaaaccattggccatcatttaaaaagtaaaattgctcaaattaatcctcaaacatttgaacaagcctttcaagaaaacgatattttagtagttgctggatttcaaggcatcaatgaacatcaggaattaacaactttaggcagaggtggttctgatacgaccgctgtggcacttgctgttagtaatcaaataccttgtgaaatttataccgacgttgatggtgtgtatgccactgacccaagacttttaccaaaggctaaacgactagacatcgtctcatatgaagaaatgatggaaatgagcgctttaggtgctggtgtacttgaaacaagaagtgttgaattagctaaaaactataatatccctttatatttaggaaaaactttatcgaacatgaaaggaacatggattatggcaaatgaagaaatattagagaaaaaagcagttactggtgtggctttggataaacatatgatgcatgtaacaattagttatcccctacctgacaatcagctacttacccaactatttacggaacttgaagaaggtgctgtaaatgttgatatgatttcacaaatcgtcaacttggatggactacaactatccttcacgattaaagatagtgattttcatcaaatttctatgattcttgaaacattaaagaatcaatatgaagcattagcttataaaatcaatgagcattatgtcaaaatttcattaattggctcaggcatgcgtgatatgtcaggtgtggcatcaaaagcatttttgacattaattgaaaataatatacctttctaccaaacaacaacatctgaaataagtatttcatacgtcattgatgattttaatgggcaacaagcggtagaaaaactatatgacgcatttaacatttaatggtaaaatgattgttaaaatattctaaaaattggaaattattataaaatggagtgacaagttatgacaaagttagcagttgtgggtgcaacaggattagtaggtacaaaaatgttggagacattaaatcgtaaaaatattcctttcgatgaattagtattattttcatcagcacgttctgcagggcaagaagttgaatttcaaggaaaaacatatacagttcaagaattaactgatgctcgtgcaagtgaacatttcgattatgtattaatgagtgctggtggcggtacaagcgaacactttgccccactttttgaaaaagctggtgcaatcgttatagacaattcaagtcaatggcgtatggcagaagatattgatttaatcgttccggaagtcaatgaacctacatttacaagaggtatcattgccaatccaaactgctctacgattcaatctgttgtacctctaaaagtattgcaagatgcttatggtttaaaacgagtggcatatacaacatatcaagctgtatcaggttcagggatgaaaggtaagaaagatttagctgaaggtgtaaatggtaaagcaccagaagcatatccacatccaatttataataatgtgttaccgcatattgatgtgtttttagaaaacggatatacaaaagaagaacaaaaaatgattgatgagacgagaaaaattttaaatgcgccagacttaaaagtaacagcaacatgcgcacgtgtgcctgttcaagatagtcatagtgttgaaattgatgtaacgcttgacaaagaaacaacagcagaagatattaaagcgttatttgatcaagatgaccgcgttgttttagtagacaatccagagaacaatgaatatccaatggcaatcaattcttctaataaagatgaagtgtttgttggccgtatacgtagagatgattcattagaaaatactttccatgtatggtgtacatcagacaatttattaaaaggtgctgcattaaatgctgtacaagtattggaacaagttatgcgtttaaaaggagcgaattaaaatgacacatttatttgagggtgttggcgttgcacttacaaccccttttacaaataacaaaattaatattgaagctttgaaaacacacgttaattttttactagaaaataatgcccaagcaatcatcgttaatggaactactgctgagagccctactttaacaacagatgaaaaagaacgcattctaaaaacagttattgatcttgtagataaacgtgttcctgtcatagcaggaactggcactaatgatactgaaaagtcaatccaagcttcaatccaagctaaagccttaggggctgatgcaattatgttaattacgccctactacaacaaaacgaatcaacgtggtttagtcaaacactttgaagcgattgcagatgctgtgaaattaccagtcgtgctgtacaatgttccttcaagaacgaacatgacaattgaaccagaaactgtagaaatattaagtcaacatccttatatagttgctttaaaagatgctacgaatgattttgagtatttagaagaagtgaaaaagcgaattgatacaaattcatttgcattatatagtggcaatgatgacaacgtcgttgaatactatcaacgtggcggtcaaggggttatctctgttattgccaatgtcattcctaaagaatttcaagcgttatacgatgctcaacaaagtggattagatattcaagatcaatttaaaccaatcggcacactgttatcagccctatcagttgatattaacccaattcctattaaagctttaacaagttatttaggatttggaaattatgaattacgtttaccattggttagcctagaagatacagatactaaagtgcttcgtgaagcatatgacacatttaaagcgggtgaaaatgagtgaaaatattactaattggctatggtgcaatgaatcaacgcgttgctagattagcagaagaaaaaggacatgaaatcgttggggtcattgaaaatacaccgaaagcaacaacgccatatcaacaatatcaacatattgcagatgttaaagatgccgatgttgcaatagatttttcaaatccaaatctgcttttccctttattagatgaagagtttcatttgccattagttgtggcaacaactggcgagaaagaaaaactacttaataagttagatgaattgagtcaaaatatacctgtatttttcagcgcgaacatgagttatggcgttcatgcactgactaaaattttagcagctgctgttcccctacttgatgaattcgacatcgaattaactgaggcacatcataataaaaaagtagatgcaccaagtggtacgttagaaaaattgtatgatgtgatcgtatctttgaaagaaaatgtaacacctgtgtatgatagacatgaattaaatgaaaaacgccagccacaagatattggtatacattctattcgtggaggtacgattgtcggtgaacatgaagttctatttgctggcactgatgaaacgattcaaatcacgcatcgtgcacaatcaaaagatatttttgcgaatggtgcaatacaagcagcagaacgcttagttaataaaccaaacggcttttatacgtttgacaacttataaacatattaaaggagattgattattttatggtacaacatttaacagctgaagaaattattcaatatataagtgatgctaaaaagtctacaccaataaaagtatatttaaatggtaattttgaaggcatcacatatccagaaagttttaaagtatttggttcagaacaatctaaagtaatcttttgtgaagcggatgattggaaacctttttacgaagcatatggtagtcaattcgaagatatagaaattgaaatggatcgtcgcaattctgccattccattaaaagacttaacaaatacgaatgcacgaattgaaccaggtgcgtttattagagaacaagccattattgaagatggtgctgtcgttatgatgggcgcaacaattaatattggcgcagtcgttggcgaaggtacaatgattgatatgaatgctactctcggtggtcgtgctacaactggtaaaaatgtacatgtaggggctggcgcagtattagcaggtgtgattgaaccccctagtgcatcaccggttataatcgaggatgatgtattaatcggtgcaaatgcagttattttagaaggtgtacgtgttggtaaaggtgctattgttgcagctggcgcgattgtgacacaagatgtaccagctggtgcagttgttgctggtacacctgcaaaagtgattaagcaagcttctgaagtacaagatactaaaaaagagattgtagcagcattaagaaaactgaatgactagtgacgtcaacgtataataatttcaaggttgagatacgattatgtctcaaccttattgtttatcattgaataaacttatgatcacaaatttcgaaatacgttacactatttatatagtaatttaacacaaaggattgataattatgaatgaattagaatttgttacgaaacatcgccgtcatttacatcaacatcctgaattaagcttacatgaatttgaaacaactgcttatattaaagcgtttttagatagtttaaatattaaatacgattgcccattggaaactggcgtcattgcatacttagaaggtaatggctcacatacgatagcgtatagagctgatattgatgcgttacctattttagaggaaaatgatgtgccttatcgcagtcaatctgatcatgtgatgcatgcttgtggacatgatggtcatacaactgcattaatactttttgtacaacgttgcaaagacatgcaagacgcaggtcaattaccgcaaaatgtcgttttcattttccaacctgcagaagaaactggtggcggtgcaaatcgattaataaaagccggtgcctttgataagtatccaattgaagcggtatttggtattcatgttaacccatttgctgatgaaggcattgcagtgataagagatgaagaaattacggccagcgcaacagagtatcgctttttcttaacaggcttgtcaagtcatgttgctgataaagaacaaggtcattcttgtggtgaagcattacaacatgtattaactcaaatatcacaaattcaacaatttcaccttaacggtttgaaacgaaatattgttcatattggtcattttaaagctggtgaagcgattaacactgtaccaagtaatggttatttagaaggtactattcgtacatatgatattgatgatttaacaatcgttaaaaatcaaatgcacaagatagcagaaagtgtcaagcttctgtttaatgtagattgtgaagttaaatttgcagaaggttatccccctacaatcaatagtccgaaattacgtactcaaatagaggacgccttaataaaagctgatttaaatgtctatgacaaaccaacgccattcttatttggggaagattttagtttttatggtcaacaactagctccagcttactttgtttttataggaacacgaaatgaagataaaggttttgtaactggtttgcacacatcacatttaaattttgatgaaaaagtgttaataaacgtggttaatttttacgaaaatttattaaataattacaaagaggtgtaatacattgacagcaacatggtctgtaaataagaaaatatttttacaaaatgcaatcacagtcaaaaacaatcagccattaatggcagttg

SEQ ID NO: 13 - DNA, 2751266 bp, Staphylococcus aureus subsp. aureus CN1 (residues 1,375,634-2,751,266 of 2,751,266)
ttaaaaataatgcatatcactatgacctagaatttgctgtaactcagtttatccatgcaggtatagatacatttagcacaacatcactacgagaagcaattcaaattagacaacttgctccagatgcaacaatctttttaatgaatgcagtttacgagtttgatttagtccgtgaacatcaaatacacatgactttgccgtcgttgacatattactataaccataaaaatgatttagcaggtattcatgttcacttagaatttgaaaatttattacatcggtctggatttaaagatttaaacgaaattaaagaagtattgaaagatcaccatcataatcaaaatgcaaaaatgattattagtggtttatggacccattttggatatgctgatgaattcgatgtgtcagattataatgttgaacgttcacaatggatggaaattgttgaagcacttttatctgaaggttatcagttcgacctaatccatgctcaaaatagtgcgagtttttatcgggaaggacaaatattactaccccaccatacacatgcgcgtgtaggtattgcgttatacggttcaagaccatatagttcactgaatcaacatgatatagttcagtcattaactgtaaaagcacatgttattcaagtgcgcgaagtacaagctggtgattattgcggttatagctttgcctttgaagtgactaaaaacaatacaaaattagctgtagttgatatcggttatggcgatggaattttaagaactcgtgctaaacatgaagcacttatcaatggtaaacgctacccgatacgtgcattaatgatgagccatatgtttgttgaagttgatggcaatgtacatgcacaagatgaagttattctttataataatgatatccgcatcgatgaatatacctttaaaggtgttggtgcaaattctgaacaattaagtgctatgaatcatgattctttaaaaaaggagtacatttcaaatgactgttaaatataatcaaaatggcgaattaacaatggatggtattagtttaaaaacgattgcgcaaagctttggtacacctaccattgtttatgatgaactacaaattagagaacagatgcgccgttaccatcgcgcatttaaagatagtggattaaaatacaatatttcatacgcctcaaaagcgtttacttgcattcaaatggtcaaacttgtagctgaggaagatttacagttagatgttgtttctgaaggtgaattatatacagctttagaagcaggttttgaaccgagtcgcatccatttccatggtaacaataaaacgaaacatgaaattaggtatgctttagaaaataatatcggttattttgttatagattcattagaagaaattgaattaatagaccgctatgctaatgatacggttcaagttgtattacgagttaatccaggtgttgaagcacatacacacgaatttattcaaactgggcaagaagatagtaagtttggattatcaattcaatatggcttagctaaaaaagcaattgacaaagtccaacaatctaaacacttaaaattaaaaggtgtacattgtcatattggttcacagattgaaggtacagaagcatttattgaaactgctaaaattgttttacgttggcttaaagagcaaggcattcaagttgaattattaaaccttggtggtggctttggtattaaatatgttgaaggtgacgaaagtttccctatcgaaagtggtattaaagatattacagacgcaataaaatccgaaattaaagttctaggtatagatgcaccagaaataggtattgaaccgggacgatcaattgtaggtgaagctggcgttactttatatgaagttggaaccattaaagaaattccagagattaataaatatgtttcaatcgatggcggtatgagtgatcatatcagaactgcactttatgacgcaaagtatcaagcattgcttgttaatagaaatgaagaagcagatgacagtgtaactatagctggaaaattatgtgagtctggtgatatcattattaaagacgctaaattacctttatcagtcaaacgtggagactatcttgctatattatcaactggtgcatatcattactctatggcatccaattacaatcaaatgcaaaagccttctgtgtttttcttaaaagatggcaaagcacgtgaagttataaagcgacaatcgttaagacaactcattattaatgatacaaaataaaaggttctccaccaaatgtggtgggtatataatttaaagaactatttttaaaatacaacttttagagtttttattattaggcggccagtccattattgggcttggttgtcttctttttttctcctttgtacaagctgaaaatcatcattatacgtgctttaaagttattgaaatttctgtaaccaaaagaaattcgcttgattaattttatcttattattaattccttctatagcaccattattaaatgctgggtaataaattgtatttcttaacatcctttgatgttttctataatatttaaccactttccatacacccttactcacagactttttactaactgaatttaaacgattaataaatttaggccaattacataaccttaggtcttttcgtaatccttggacaagttcgtaggagtgtcgtagtatatcgtcttttgaaagcatgaattctacaatgtcagatgagcgtttataagccttaaaagatttattccatctgtatttactaaatatggttttactagtatccatcaatagaactttccagttattcttaaaaattgtataattaggtccttttttattacggtattcattcataacttgtacacgatacttattaagttctctatttaaatgttgaacgatatggaatctgtcaaaaataatagctgcattaggaaataggtcgcgaaataatcggacatagggttcatacatgtcaatagtaaccgtcttaacttgttgtcgattttttaaatcgaatcgctcgaaataggcacgcaagaatcttgtagttctattttctaaaatatctataacatcatgagtatcattatctataaaaatgaaactcattgatccagttacatttttaacgcttttaaattcatccatagcgatgtgttctggcaaacaattaaagggtttaattcgtaatgaattagccgctttagttctaatacgacttacagtagatggagagatacagttatcttctgcagtatcaatctctgttttaactttagtagcttcttctataactttttgagtaacacatcttgagataaaacacgactcatcaacaattgacgttttagcagtaaaagtgccattgcattctaagcatttaaaacgttgtttagctaagttgaggtatgtgttatacccttgagttttaagtaaagtaatacgagaaacacgcttaccatgtttatgaatttgtccttcatttttaactccacaacaataacaggccgaaggcttatacgttagtacagcattaaccactgttgctttttttcctttgataatgacgtcaatttcttggtttatatattttatattttcatcttttattcttagtaattctaaggtatcattacacataggcgcacttgtctcctttagtttgggtttggtcactttaaattatagaggcaattgcgctttttgtgtattaaaaaaagcaggaagttttaccttcccaccataaaagatgaagaaccaaataaaaataaacaaagtaatccccgaagcacagaaaattatactgtgactcggggaatttttatgcattatagatgactgtagataacatgcttggacatatactctaaaaaaggaagaacagcacatttttagttagaaagtatttatttctttttgtcattaatcctttatatttagttagccctattcaactaatttaaagcatcatatacataccacactttaaacaagcatcatgaaattaggttttatgctttacttgctttttcaaataatataaaacgataagaattaacaacaaatataatgtataaaacagaatttcatcaaatccaaaatctttacttgtaattaatacatcaatatcttctaattccatcatctctgctttaatataattattaaactttggcaaagtcattaaatgtacattgtaaatatagtaataaaagtcgataaatatgatgttaaaaaatatgtatgttttatcaatattagttttgaaaaataatatcccagaaatcattatcggaatcactaatacaatcatcattgctgctaaaatattaatatttaaaccaattgcagataatacaccgaaaactaataaattagcaactaaactaaggataagatatttcataaaatcacctcgtcgttgtacaccataattatattatataaatatttttttctattgcaaacaatgttggtgatataaaaaaagagttctcaatttggttgagaaactcatcgcgttaagtatttgtaataagcatataaaaacaccttacttcttggtaaggtgttagttaaaatcaatgattcaaatctaagaattatagtttaacaacgtttgcagcttgtggaccgcggtcgccttcaactacttcaaactcaacagcttgaccttcttctaatgatttgtaaccatcttggttaattgctgaaaaatgtacgaatacgtcattttctccttcaacttcgataaagccgaatcctttttcagcgttaaaccatttaactgtaccttgtttcataatctgaaacctccaagactaaaattcattcaatatgcttattcgcatattacaaaaaatacatgcaaatttcactcaaatattctttgcaatatggaataatcatctgcttaacttgtattatagtgcagttattaccaaattgcaatacaataataaaaaatattcatttaatcaattattggtagtttataatatacttcattattttgtaaaacaatgaaactataaaatatttgtaaatcctcttcacaatcttcgcaatagttcatgtcacaattattataaaatgcataaatattatatttgcctgtgacataattatcgaactgaactttacattgattaatcaattgttgatagtgcttaaacatgtcatcaaaatcttgatattgatatttttcaacaatgttttctggccagtcactgaataaccaccatccctcataatcggctctaattttggtaactgtccacattattaaagaccccttccatacttcaaaaactctatacttatttttatacctttatcctctgaaaatcaagtttgacgacttgaaacaaacaaagtagtaactatagtaattattagtttttttaagtaaaactacgtataataacattatgaggtggtaaaaatgagacatatacatttacaagtattcggacgcgttcaaggcgtcggatttagatattttacacaacgcattgcaatgaactataacattgtcggtactgttcaaaatgtagatgactatgtagagatatatgcacaaggggatgacgcagatatagagagatttattcaaggtgtaattgaaggtgcctcaccagcatcaaatgtaacaagccatcaacttgaagagttagaactaaatcaaaaattatcggattttcgatcaatataaaatgctaaataaaggaagatgacagtgagatataatatttctcatatatttggggtgttagtgggaattcctgtagcgtttttaacaagcatatttgggatgattgcacttgatgtatcttttttaattgatatgtctattggtattgttggctttttaatgacatacctaccgatacaaaaactcacttcacgcaaatatttaaacgaaattggtttgactagaaaagactatcgctatattcgaaatcagttaaatcatacacaccaaaaacttagaggtattttaaaaacgtatgtcaatataagatcaattaaagattttaggcagattaatgatatataccaaatttcacgttctatttatacgacagttagacagagacctgcatcattttataaagttgaaggctttttttattctcatattgataatgctttaaatttggttgatgcatatacacgtctagcaaaaatgcccaaaaaatcaattaatgaacagcaaaagttagaacaaacacgaattactttggatgaggtcaaacgaacattaatcgctgatttaaagcgtctcaacgaagatgattatgaacgtttagatattgaaatggaattaaataagttacatcaaaaacatcatcaagattgatgtaaaatagcaactattggagagatgattgatgactgaaaataaaagtttcaaagaaagccatccactagatgattttataagcgataaagaattatcgaatactactattcaaaaagaaaagttaacaattgaacaacaaaaacaggtagacacaatcagtaaacaaattaaccctttagacaatgaaggtttattagcgtttggttctgatttacagaaacaaatgtctcaattttcacatcaaatgttggatgaagtacaaagtaaagatgttggtcctattggagatactttgtcagatctaatgtcaaaactaaagtcagttaatccaaatgagttaaatactgataaaccatctatgttaaaaagaatttttagcagagcaaagtcgtctatcaatgaaatcttttcaagaatgcaatcagttagtgctcaagtcgatcgcataacgattcaactgcagaaacatcaaacacatttaacaagagatattgaattattagatacgctatatgataaaaacaaacaatactttgatgacttatcattgcatatcattgctgcacagcaaaaaaagttgcaattagaaaatgaaaagctaccacaattgcaacagcaagcgcagcaatccactaatcaaatggatattcaacatgttgcagatatgcagcaatttatagatagactagataaacgcatatatgacttacagctttcaagacaaatagctttgcaaactgcgccacaaattcgtatgattcaaaatgttaatcaagcacttgccgagaagatacaaagttcaattttgacaagtattccactatggaaaaatcaaatggccattgcgcttacattaatgagacagcgtaatgcagttgctgcacaacgagctgtcactgatacaactaatgatttattaacagcaaatgctgaaatgttgaaacaaaatgcgattgaaactgcaacagaaaatgagcgtggcattgttgaccttgatacattgaaacgtacacagcgtaacattattgagacaattgaagaaacattaattattcaacaacacggtcgcgaagaacgacaattagctgaaaaagaattacaacaattagaacaagatttaaagtcacatttagtgaacatcaaaggaccgaataaacaatcataaattacgaattagatataacaaaaaggaagcatcctacgattaaattggagatgcttccttttatattattcgttattcctgttgatatttaattggatcttgttttacaaatatgccgactagatagcctaatatcgttgcaataattgctactgggaaccactctaaagaatacgctcttagaggcaatgattctataaagttaattttcagccaacctaacttactaataacactgaaaatcgacaatataaatacgataataactggaatttgttgtgaaatgcgttttgtcggtatgaatttggcaattaaaattaataatacaacagttattgctactgggtatacaatgcttaataccggaattgacattgagataacagcatttaaaccttggttagcaataataaaactcattaaaatgaaaactaatacaaatgctttgtatgatactttaggtacgattctatggaaatattcagaaactgcaacaataagcccgcatgctgtagttagacatgccagagccacaatgatgcccaataaatattttccgaatgaaccaaatcctgttgaagccattgtcgttaataaatatgtcccaatgtttcgatctttggatttcaattgatctaacgtcatgtcacttactggcatatgattaccaatataacctaatgaaatatatatgaaaattaaagctacggctgcaattaaaccagcagtcaaagtttgtttgaatatttgatttgttttagtaatgcctgttagttttactgcattaacaacaatcattgaaaaagcaattgctgcaatggcatccattgttaaatagccttgtgtaaagccttcagcaaaacttgaaaaattagaatgatatagtgcttcattgccctttccagcactattaccgctaaagtctaagtatcctttaataatcatcgctaaaatagtaatcaataataatggtgttaataatgaaccaatacgatcgattaacttagatggatttaaacaaatatacaaaacgactatgaagtagataatcgtaaatataaataaagcgatactactattgctatgtataattggtgtaattgtcatttcaaaagatgtagatgcagttctaggtattgcgaaaagtggtcctatagtcaaataaatgatgattaagaacaatattgaaaatttaggtgaaattttatttaatgcgccaatatatccttctttatcaagtgcacctacaatcacacctaataatggtaaaccaatcccagttagaacaaacgctaaaatggcgggccagaaaaattgaccactatccaatccgagattaggaggaaaaattagattgcctgcgccaaaaaacatagcgaagagcgtaaacccaatgacccatgtatttttattcatagagttactcctttttttaaaacacgaaataatttacaagtaaatattttagcacaaaaaataataaagagtctatatgaaatatgttgtacatagcagaaacaaaacacatgtgttgtttaaatcaaattatgccagaaaataaaattcttcaaatttactttttaaatagtaactgatgacttttattcacactttcatataaactcatattttaaacttatttataaagatttaagtagtaatttttttaataatggagagagatgtccaggtaaatgcgcaacaccttcaacgaaaatagcatattgaccataaatattatgaattgtttgttcaacatcttcagttattggatcttgactcaaaaacacattaaatacttcaatgccaaatttacgtgacatttctacagcttcatacgtatcaataataccatcttgactataattaaatgcagacggttcgccgtctgaaaatacgattaaaaatcgttgatgttgatttcgacgcattaatcgttcacttgcaactctaatagcaacaccatcacgattatcatcttgaggttcaagtgccataatacgtgggccatctttttcaaaggttgagtaatcatagttaataatttcattaatgatatttggttgtgcatgatcgtctgaatcaaaggcatcctcactgaatgataaaatttcatgtttaatgttcaatgcttttaacgtctcgtggaataacactacacctttcttcgtttcagccattttatcatgcatacttgctgacgcatcaattaacaatgtaaacgtcgcatcaaatgatttacttaaatcttgttttttgtaaaacaatttatattgaccgtcgataaaccaattaattaaatccttttgtaatcgtccttttgttaaattaaaacgtgcatctcgttgttctcgttcaatcgttttctttataatttgaattaagtctttgatttcatattgtacgtcttgtttcgattcttgatattctaaaacatattgtggctcaatttcaggaatttgccattttatttctacatttttgttcacaccatcaagttgaaatgcttggctttgaccaacagcatcgccttcttcacgatttagcgtatcgtttgaacctttgccctttttggtcatcatatcagtcatatcatctgtagcatcgccttcacgtgcttcatcattacccaatgtttcactattttgtccttcgtgaagttccatttctaaataggcgccaccttttgactcactatctgcagatttagagtcagctttttcacttccgttatcatcatcttctgaagtatcatcttgcccatcgacttgacttgcatcagttctctttaaatcatcaaactctggactagctaatgtattatatagtgttttaggtaagtaataatattcgtttagcatatcttcttttaaaatatcatctacttgatacataattctttgagccagatacatattatcttcagaattttgattttggaaaaaattaggtaaatataagaacatattaactacaatatcatctaaatctgaatgtatagatggtatatcaaagaaatcttggcttaaaaatgcatgttctaaatacaaaaataataaatctgtatattgtgttttagtacgatacactttaatttgagattccgtatatgatatacgtgtatctaagcgaagatcaattaatttagcagtacttgggcgctcaactttaatagaatttaatacgcgcatatcttctaataatttaaaaagttgttgataaaatttagggtgtttaaaagttttatcttgtactacttcatttacaatttgtacatccatcatatgataaccgtaagcagctaacataacatctgtttttaaaccagccatttcgatatggcttggtcgatgtgaccaaaaccaactcgtaatcaaaacattttgaacaggattatagtaagggaatttttggattttaacttgtgtttgttcattttttaataagagtcgagctaagtcttgcaacatcattacttgcttggcatctaactgttcgtcgttaaattttatgaaacgatcactcatgttttatccctctttaaaagtttagttctacagcattatatattgcttgttgttcacgttcatcttccaatttatcaataattgtacgtttaattgcacgttcaactggcattacagtgattaaatcacacaagtctaataatgcacggatactagcggcttcttcagaaatttgtccctgcttagacatagtacgtaaatcttcgttaaacttaataatttgttcgatttgtttatcatcttgtaataaactttgctctttaatcacattttttaaaatgtccccatcaatataatcaacgtgaataacaacaaaacgattttttagtgcttcattcattggcaaagtaccaacataaccttcatttatcgctgctataacgttaaatcctggtacagctttgattacttcaccagtgtatggattcgtaatttgacgacgataatctaatacaccatttaatacaggcaatgtttcaggtttagccatatttatttcatcaatatataaaatatgcccctctttcatagctttaataactggaccatctacaaagacaatttcttgttgaccttccgcatttgttttaattgttttaaagcctaataagctttctgtatctaaatcaacagaacagttgacttgatgcatgggtgtatcaacaacctcacttaatgtttctgccaacttcgttttccctgaacctgttggacctttaagtaaaatatttttatttaaatcaaataatgccttcgcatcattgaaaactgttgaatctgaattcttataatgttttagtgccattttaaaacgttctcctttaaataaattaaaaaactaagacatggaataagttctccaaatgccttagtttactattctattctgatataaaacgcaatgcttagtatgcgaattgtttatattttaacaaatttactaattgaaaatctcatattaggcttcatttcaataattatgcgtttaaacttctttgaaatatgttttatagtaaccgccaactaatccagaattatctattatttgataatattcttcagtttcgttgataacatcatattgtttgccaaccgttaacatgtcagaaactgtaaatttctttgcatctgtattaatgacttctactttcttgattggtgtacgttctttccaagtttcatgtaacataaattttgtcctcactatcgtaaaaaaattatttttgtaaagtgaatataaacgataatccactgttttcagtaattctaattgattcaatatcatcttgctcaagcgtttgatatggtatttccacttcatctaagcgcgatttcgcttgattaaagaaatctgcatctttcgtttcaaactcaacttgatcgactgcgccatattccggcattgtcatttcggtttctacaggcattaaatgtatttcgccacctagaccacccgttccaattttgaatacttggacatgatagtcagcattgtcgaagggttggtattctgcaaatacttcaagtccgaatatatttgttaaaatttgacctgtaatatctacatgattcactttaagaatcactgatcctaaaccttgcacttgatgtaaaggattgaccgcactctcaaaagaaggcatacctaaaccaacgccataattattctcgtttgaatatattgagaaaatatgaccattgttatcttcgagactgaaatatttattgccatttaattctttaactgttgtaaatggaatatccttattcgataatatttccgcatactcctctaaacctgagtcagttggtgtacgtaatccaatacccacaaagtgagattcttctaattgctcacttggaacttgtataaattgaagtcttgttcctgggcttatatctgcatcgccgaaacgaattgagttttcaagaagttcttcataatttaatcctaatatgtcaaccatgaaatgttttgtctgttctatatttgttgtacctaatgttatacttctaagtccacacattatagccacctctatctttatctttactattatattataacttattttaatcataaattatagaatatcggtcagttgattttgattatagattaatatgtgaaaaatgtatttctttaaaagaactatttcatttaaataggtaacataatattgttatggttgctattgagtgtgtcattaatgagtatctgtatatagcaattgaatatttcgttttttgtagtacataaaaaacatatatatgtcgtgtccataaagtgaatttacatcttgttcagatgattttaaattaactaaaagcgcttatagaattcaaaaatttcatcgcttgttattatctaaaatgatttcattagcatattgtaacacgctattctacctatatttctattgtgagtctatttcaatagaaatgatatattttttaagtagtcaaaattaaactcacattttaatacgaagcattataaaaataaagtacagcagtaagatatttcgactagaaaataatcttactgctgtttgttattgatttgattacgtttttaggaatagtaaactattttgtgttgtggattaagattctaataataagtcttctgggttttcaattaattctttaattgtttttaagaatccaactgcttctttaccgtcaataattctatgatcatagcttaatgcaatatacatcattggacgattttcgattgtatcttgatcaatcgcaattggtcttgtaataattgaatgcatgcctaagattgcagcttgattaccattgataattggcgtactcatcattgatccaaaaataccgccatttgtaatcgtaaatgaaccattaaccatatcatctaagccaagttttttctctcgtgctttaactgctaaattagcaatttctgcttcgatttctgcaaaattctttttatcacaatctcttacaaatggtactaataatccatcatctgtagaaacagctacaccaatatcataatattgtttcgtaatcatgtcgtcgccgtcgatttctgcattaacttctggatactttttcaaagctgctacagaagctttagtaaagaatgacataaatcctaatttagtaccatcatgatctttcataaattgttctttcttacgtttacgcaattccataacatttgtcatgtcaacttcgttaaatgttgttaacatagctgtattattagatacctctaataattttttggcagctgttttctttctgcgtgacattttttcacgaatcactggttttgtaggatattgattgtattttttctcttcttttgcagatgcttgttgtgttgtttgtgttgatgccggtgcctgttgtttcttatcaatatcttctttacgaaccacatcatttgttttcggacttacttcagcaagattcacaccattttcacgagcatatcgacgcgcagaaggcgtagcattaatacgttgctgattgtcatcatttgcttgattgacttcagctttatctaccgaattatttgttgtttcttcttttttattatttgtttcttcattttgttgtggagtattgtcgttactattttctttagaagcattgccactaccttcgccgatgatagcaattgcttgtccaacttctacagtgtcgccttcacttgcaagttgttcagataatacacctgcttcttcagatacaacttcgacattaactttatcagtttctaattcaagaatagcttcacctttttctacgctatcccctacgtttttcaaccattctgcaatggtaccttctgtaatagattctgctaattctggaactttaacctctggcatgacttatttccccctagttattttttaatgcattttctataattttattttgaacaagtttatgaatttctccatcgccttcagctggagcagccctttgaattctgccatgataacttaaatcatatttatctgcaactagcactttaacatatggatagacatataaccatgcaccttgatttttaggttcttcttgtacccatgacacttcttcaaggtttggcaattgtgctagtaatgcttcaatctcttcctctgggaatggatacaatctttcgatcgcaacgagtaatactgattcgtctggatttttagctaatgcttcttttaaatcaatgaacattttaccagttgctaaaataacttttgtaaccttatccgcttgatatgattctgtcaaaattggctcaaatccaccagaagtaaattcatcaattggttttgcaactgttttatttctcagcaagctttttggcgacataacaaccaatggtcgcatttgttcagaatctaaactagccgcttgtgcacgcaataagtggaaataattacttgaactagataagttgacaactgtgcaattattttcagcagctaattgtaaaaacctctctaatcttgctgatgaatgttcaggaccttgaccctcatatgcatgaggtaagaataatgttaatcctgaacgttctccccattttgagcgagaactgaataagaagttgtcaaaaatcatttgtgacatatttgcaaaatcaccatattgcgcttcccaaatattgaagctttttttgttttccacattatagccgtattcaaaaccaactactgctgcttctgaaagcggagaattgtgtatatcaaatgtcgctttttgatcaggaacatgatgtaaaggtgtatatgtttcacctgtttgctcatcatgtaacacggcatgcctatgactgaatgtaccacgttcactatcttgaccagttaagcgaatcggtgtaccatcttgtaaaattgtcgcaaatgcaagttgttctgcttgtgcccaatcaactaaaccatcttctttattaaacggctcatgacgcttctcaagaactttgtttaactttttcaaaatgttaaagccatccggatatgttaacaatgcatcatttatttctttcaaatgatcaaacgtaaatgattgttcgtctgcttgtaacggtaatgcaagttctgcaggtttttccatatctggattatccattttatcagctttattaattttatcatgagcttgtcttagttccttttggacttgttctataaatgaatgcatttcatcttctgaaatgacaccttcattaacaagctttttaccaaacacatattcaacagagtcatgtttgcgaatattctgataaggaactggattagtaattgatggttcatccatttcgttatgtccaaaacgacgataacctactaaatcaataacgacgtctttatgaaactcttttctaaattccattgcaatatcaattgcttcaatagtagcttcaacgtcatcagcattgacatggaatattggcacatcataacctttggccacatctgtagaataagttgttgaacgtgcatcaattggttctgtagtaaatccaattctattgttagtaataatatgcaatgaaccacccgtagaatagcctttcaagtttcctaagttcattgtttcgaagttaattccttgaccaggataagcagcatcgccatgtataataattggcattgctttatgatgatcagtcgtcggagccccagctcgttgtgtatcatcttgtgctgctctcgtacgcccctcaacaacaggtgcaacaatttccaagtgacttggattgttagccagtgcaatacgctgcattgtaccgtatgaatcagtagtttttatgccaccaaggtgatatttcacatcaccagtccatccagcagttaactgcaagctaccatcttcaggtaagaatttcattggatctgtatgcataaattctgaaatcatcatttcgtacggtttttctaagacatgcgttaaaacgtttaaacgtccacggtgagccatgcctatttgtatatttttaatgccttctttcgcagcaatcgtaatagtacgttgtaacatcggtacaagtgcgtctaccccttcaattgaaaaacgctttgcaccaacgaagtttttatgaagatatttttcaaacccttcaacatacgctaattgtttgaatagtgcccttttttcgttattatttaacgttactttatatggcgtttcaattcttctttttaaccaaccacgttcggtattgttattaatatgtgtatactcaaatgcaattggtcctttgtaacgtttttccattcttaaaattgcttcataagcattatcataaatgtcggcaaagtgatctgaaacaattcctgctgatataccttccaaagtctgttgatctaaatcaaagtcttcaatctctaatttaggtacatgtttcctttttggaggatttacaggataaatatcggctttaagatgcccgtattggcgaatattatcaattaaacgcatgacacgcttaattgtgccgtcgctattttgactacttgtactttttaaagctggtacaattgagtcatcattcttaattgtgctgaataagacttgtaaatcttctggtacagatgatggatcttgtaaaaagtcatcatatagatctaacattagacctaaattcgcaccgaagtttacaggagcctctgaaacttcttttctttcgttagtcattttacaccctccacaaaaatgttgaaacgcttacaatgtaataatatcactatttagttatttgttaaagtagatttacctatttatctgctaaaaagaagaatcaacaaaagcgttgattcttctaggtttatagatgtattttattgtaaattttgtgagtacaacagaaatgataaagaaccactgtttatttgttttatagttgttcttatacattagtcacagctaatgtgtacttaaaaaattgatcctatgactttgattgacgtctcagtcatgattaaaatatgattttaaacgttgttcctttgttaatttcacttttaattttaatcgatccaccgtttaattgaatgattttttgagcaatagataatccgagtccattaccgccttgacttcttgaacgagatttatccactcgataaaagcgatcaaaaatgaaatcttgatcttcctctggaataccaattccatgatctgtaatttcaattattttttgcttattttttaaccttgtcttaactttaattttcttattcttcacatcatatttgattgcattatcaataaagattaaaaataattgttcgaattgatgaggtttcattttaatttctagatttttagatgtcagatccgtatcaaattgataatcaggatgcaattgttttaatgagtgtattcgcgaacgaatttcatcattaatatgcacggtctgtgcttcagaagaaatgtcatttacatctcctttagtcaattcaagtaattcttcgactaattttatgatacgattcatttcttcaatagaaatatttaacgattcttctaatactgctgggtctttttttccccatcgctgaatcaaatttaaatgaccttgaataatttgtaatggtgttcgtaattcatgtgacgcatcttcaacaaattgtctttgttgattaaatgattcttcaatttggctcatcatctcattaaacgtatttgctaaattatctatttcttcataatttgtatttaattgcaatttattttgaaaaccatctcgtcgaatctcaatcattttatttgataaactgacaagcggtttagtaatttgtgttgaaaatacataactgattgtggcagttataattgttgcaatcactccaaatgccagcgcaatgatatacaatgattttacgatgttatcataattttctagtgaatgaattaacaagctataccctttgaaatcttgcgttgtaattggttctttaataattaaatattcaatgcctttatagcgtttttttattacgcggtcaaaataacggtgttcataacctggttcaactctcactgtgttatcattcgatgtctcaaataatttattattatgctcatcataaataattatctcttgaaaattacctaaagatgcattcaagtctaatgcagatatatctttaacaggcttagaatgaaataaattattaatatcgcttgagcttcgttctgcatcatcaagctcactattatgcagtgtatctttcaagaaaaaaataataattaaacaaaacaaaaatatcgtgacaaacgtaatcatcgtggtaacaataatccagttattgcgcaatttacgttttgtcatcgtatcacatacccaacgccacgaactgtttcaatcattttgtcacgatcgtatggttttaatttgtttcgtaaatatcttatataaacatctacgacatttgtttctacttcactattataaccccatacatgatttaaaatttgttcccgttgcataacatggtttttattttcagcaagaagatatagtaaatcatactctgtttttgttaattcaatttctgcgccatttaccgtcactttaaaagcattcttatcaattgtaataccattgacatcgataatatctttttgtggctgacgacgtaaaatcgcacgtattcttgctaaaagttcttcaatatcaaatggcttaactatataatcgtctgcaccgtaatcaagcccagcaactttgtcatacgtatcacttttcgctgtaattataatgataggtgtagattgttgttgtctaattttgcgacaaatttctaagccattaattgacggcaacattaaatctaatatgattaaatcatagtaatggctaagcgctttatctaaaccgtcttgtccatcatactctgtgtccacattgtaattttcatgtgtgagttccaattcaagaaatcttgctaagttttgttcatcttctactattaaaatttgcgtcatttgtacacctcatattacgactttttctaataaggtaatatattttaaattttgtatttttctatacaatagttgctttttaaattagtttgtttacgtttaaattttatcacaaatcaataaccatgttttaaatttttcaagctacaatcattaattatttattaactcaaatatttaataatcagttaatggaattctgttaattctgattgcagtacttaaatatagaatactgtaacacaaggccttaccgcaatatcaattgttgtcgtatacttacttttcactaatgtaaaatgaatagttattatctttattttcacaaaatgaccgtagtttaaacattttcacacatcatttcaatgtgcgattttgaacttggaagtaacatttcataatgtataaattcaaaaggagtatgtaaataatataatttttaaacctcataacttttaaatattctaattctaatgagaaatacaaatttttttattttctaaaatagcgtaatcatgcgttttatttactattcttaaaaaatattcaaaaaaagttttagtttctaattgacaatgattctcactaatgtataatagtagttgaaaatgattatcaataccacatagaacatcccccccacaacgtttcgttcttgttggattggtcattttcaaatattccccttttatatgcccgtaaaagacaatatacgttataacaacgttttataaaagcagtaaacccttacgacactttaggtttactgcttttgtttttttactatttaatttattaatttatttctaagtaataacgttgataaaataatgcaaaatacgccaccaataatgccggcaataatatctgttggataatgtacacctagatatacacgtgatatggaaatcaataaaatcatagctgcacataaccctataagaataccttttgaattaccttgatttaatcgatttaatagatagataccacttccaaaatatgcagttgatcccatagcatgaccgctaggaaaactaaatcctgttatatcaattaaacgcagcaatgtaggtctttctctatcgaatatattttttaatgctggattcaaaattccagatagtgtcattgttaatgcaaaaaataatgcttcaattttgtggcgctttaacatgagatatgccacaagaagtaatgaaatacataacattgcccagacttcacctactttagtagccccaagcatgatagatgtcgtaataaagctctctgatgaatatataaattcataaacttcattatcaatccatttccctagtcttgattcgtggaaaaacgcgataattccaaaaaccaatgtaaaaacgatgagcaaagagatacgtttccattgactcataaagcattaccccccattaattcaatgcgtctttaatcatcttatcaaataaagcttctttcgtataactttgttcatacgatttcatattattgataattcgagttctttcctgttccatttcatttagttcttgtaataaaatttgtgctgttaattgttcttcatcaatcgttttagcataacctttatcagcaaaatgatttgcattgtcaatttggtcgcctcgggattgatctaaacctaatggtactaataacattggtatacgtaatgttaagaactcataaatcgcatttgatccagctctacttattactgtgtccgtaattgctaataaatctgttaaatcctctttaacaaattcatattgtatatatcctgattttttaacttgagcatcttttaatcctttaccagttaaatgtatcacttgatattgttgtaataatgcatctaagttttcgcgaataatgctatttaattttttacttcctaagcttccacccataacgagtaaaacttttttattttcattaaagcctgttaattgataaccattatgtgcattaccattttttaaatcttctcgaattgttgctccaataaaatcagctttctctttaggtaggtagtttagcgtttcttcaaatgttgtatatattttcttggcaaatttaagtgctatcttattcgctaatcctggtgttaagtcagattcatgaataatagttggtatatttaatgatttggctgcaataacaacaggcacagatacaaatccaccttttgaaaataatagatcaggtttttcttttttcaaaactttacgagcatcaagaatacctttcaatactttaaatacgtctttggcattttctaaagaaatatatcttcttaatttaccactcgaaataggataatacttaatttctggtagttgtgattcaatcatttctctttcaataccatttttagaaccaatataaagcgcttcataaccttgtgataatgcagttggaattaaacttaaatttactgatacgtgtccaactgttccccctccggtaaatgcgattttcgtcattaatattacctctattcttttaaatttttataatatgcataaaatggttcacctttatcatatggcggatattccattaattgttcaccgaccttatgaaatccaaatttggcaaataaaccttgtgcaggtttgtttaacgcaaaggtgtccgttaaaataacttctgcaccacgtgctttaactacatcaataacataattgaataattctgtagcagctcctttatattctttcgaaccagttaatctatgaataacaaaggcgccttctctatttactggccagtcaatgtcatcataccattctgcttggtcttggtcgacaacaataaagccataaattttgtcattttcctctaatacgtacaaataatctttagcaatatcttcttcaaaatgttctaaaagtgggtactgatcgtcccattgctcgttgtcgtgttctttcattaattcttttgcttcttctactagatttaagatttgatctaaatctgacattttacctagacggatcatgtacgtcactccttatatcgttatgttaaacatgtttttcagtacatgttaatcttacacactattaacatgctttaaacctttattatgaatgaaaaatagtaattatcacactatgggatgaaaataaccaataaaagtatcatataccaattaatcgattgttaaaactagtgaataatactatttaaaaagtatatgctcatagtatattaaagcatgaattgttaacagcgatgatagaaattgcgttatttacatcatttgtaaatgtctaatttatatcttttagggttagacgtcaataaaaataaacacgcctcctaaattgctatctttgcaaatttaggaagcgtgtcattaacataataataatacaattttagtagtgtgtatcgcttattttaaaatattaatcaacttatcgagaacatcatcatgtttattagctttttcaactaataactcagtaaatttattattcgtttctttattaaattcaccagttacctcgagtttattcgcttgttggaaagctttaacttgattttctaaagcttgatcaaattgcgttgattcattatcaactttataacctaaagctgataaaccaattttaatagttttaatatttttatcatcgtctccaactttaaatgttttcgtattaggaatgacatttaaagattgatatttaggtgtgtcaatagtaacgtctggtttaatgcccttaccgtgaatataatgaccatctggcgttaaccatttcatttcagtatattttaacaatgaaccatccttaaactctcttgtagtttgtacgacacctttgccgaatgtttttgacccataaactttagctttattatagtcctttagcgcaccagtaaacacttcagaagcactagctgaaccttcattcactaagatggatatatccatgtctttcgcttcttttaacgagtcattagaagtttgaattgcttcagtatctttacctttttctagtttaacaacagtttttcctttatcgataaaaatatttgccattttaacagcttcatctagtagtccaccaggattatttcttaaatctaaaacaatctttttcaaaccatctttgtgagctttaagaactgcatctttcaattcacctgatgtatcattctggaatttattaatagtaataactccaaccttaccttttttcttatactcaacacttttaacatgaattttttcacgtttaatcttaacgtctttttcttcactgcctcgttgaacagttaaagttacttcagtgttttctttaccacgaacgtctttgacaacttcgtctaatgcttttcctttaattgattttccatttactttagtaatgacatctttaggacggatgccagcacgttctgctggagaacccttcatagggctagtaaccataatttgatcatttttcttttgcatttctgcaccaatacctacaaaatcacctgaaacaccttcattaaaggatttcgtttgttcttttgttaaatattcagaataaggatcttttaattctttgaccataccatcaattgcagctttacttaacttgtcagagtcctgttttttgtaataatcactatttaagattttatacacattttcaattttatttaagtttgcttgatcagttttgtttaaaccacttattttttgatttataaaaatatatgcaacaactgtgatgacagctgttattagggttgtaccaattaatattgatatgaattgccaacgttttaagtgaacgcgtttcgatgaattagtttcttggtcttgattgcttgttgcaatttcagcgcgttcatcatcggatgaagatgtgtgttgcttatcatccattgtatcacttccttattatgtattatgtacttttaaattctgtgtagttaatcatatcaatttatgcaagatagcgcaccatatttcactataattgattaatttttagtcacaacttagtttattttaaattaaaaccaggataacgaattgcatcaccctggttctaactattatttttaaaaattatattaaaattttagccattccgtatattcttcatataaatcatcaaatacagacattggcaatgtgaaatcaccatgtgtctcaatataatcagacagtatgttaaaatcatcatcgtgttttgggaaagcaagatcgtcaaatatctcttctgctagacgacctttatcgtcgtgtcgaccacgaactgtcatgacaaattgataaaacgaatagtttttcattagttcattgtcacatcaatcacttttgtttcacctttaatcacagcattttcatcataaatattaattgaagctgcttgatcagtgttagtaattataattggtgaaataacagatttagcgttattattaatatattcaaggttgaatcttactaatggatctccgacgttaacttcgtcaccactagacactaacacttcaaatccttcaccgtctaattgaactgtgtctaaaccgatatgaactaataattctaatccgttatctgcttttaacccaatcgcatgcttagttggaaagacattatcaacacgtcctgcaattggagacacaacttctccttcagttggattaataccaaacccttcgcccatcattttttgtgcgaatacaggatctggaatatcttcaattttcacgtattctccagttaatggtgcataaattgcgatatctttctgaacttctttgccttttccgaataattttttaaacatactttccactcctacttatcaaaatgtgatattaaatcgccataacccaattcttctaatttttcatatggaataaattgaattgcagcggaattgatacagtatcttaagccgccactttctttaggtccatcattaaagacatgtcctaaatgactatttgattcttctgaacgcacttcagttctcaacataccaaatgatttgtcgactaattctataatttcttcgtcatcaagcgctttggaaaagctaggccatccacattcagaatgaaacttttcttcagatgtaaataaaggtttaccagaaatcttatctacataaatccctttagcaaaatgattccaatattcattcataaatggtggttcagtgccgttttcttgtgtaacaatatattctatatctgttagttcacttttatcttttttaagcattttgattcccccaatgtgattctataaacgcttttctacctgaaccacgttgatattggtaataatgtaccgggttctttttataataatcttgatggtagtcttcagctggatagaaatttttatatggtttaataggtgtaatcactggtttcttgaaaataccttgttcatttaattgttgctttttaaactcagcagcctttttctgatgttcatcatgatagaaaatgactggttgatagctttcgcctctatcgaaaaattgcccttgatcatcagttgggtcaaatgttttgaaatatatgtctaatatattttcaaaggaagtaacctctggatcaaacgtaatttgtactgcttcgacatggccggttttattcgtacatacctgttcataagtagggttatcaacatgaccgccactataaccagatacgactgacttgatgcctggatatgatgtaaatggtttaaccatgcaccagaaacatcctcctgctaatgttgcatattcttttgtcatatgaattacctcctctatctatctaattataaatttagtctataaaggattgaaatggaagtaattaacactgaaaagattaaatttacttcttaaggactacgaggccaatcgcaccttgaccagtatgtgcagaaataactggtgtagttacatttatatcgtaattattcacatgaaaagcttcgttaaaaactttcttcaatttatcaacatattcaatgacgttagcatgtgcgacaccaatggatttgatttcatgatctcctataaattcagcaatttcctttttcaagtattggatactagaattttgagttctcgcattgtgcacaagctctaagcgaccatcatctagtgtaccaattggtttaattttcataagattaccaatcaaaccttttgttttactaattctgccacctttaattaattgattcaattgccctataactacaaataatttaatgttttctcttaaatgatttaactttttaactatttcagaagttgagacaccttcttttacaagctctactaggtgttgtatttgataccctaaaccaaaagaaatagattttgaatcaataacagttacattagcatctaccatttgacttgcttggtaagcagtgttatatgtaccacttaatcctgaagaaagatgaatacttatgatttcagagccatcttttcctagttcttcataagcagatataaattcacctatggctggctgacttgtctttacatcttcatcattttcaatatgattaataaattcttctgatgtaatatctacttggtcaacgtatgaagctccttcaatagttaaacttaaaggaattacatgaatgttgtttgcttctaagtattctttagataaatcggatgttgagtctgttactataatctgttttgtcatggtcgttttcccccttattttttacgaattaaatgtagaaaggtatgtggaattgtatttttctcatctagtttaccttcaactgaagaggcaatttcccagtcttcaaatgtataaggtggaaagaacgtatcgccacggaatttaccttcaataacagtaatatacatgtcgtccactttatcaatcatttcttcaaataatgtttgccctccaaatatgaaaacatggcccggtagttggtaaatatcttcaatagagtgaattacatcaacgccctctacgttgaaacttgtatctgaagtaagtacaacatttcgacgattcggtagtggtttaccaatcgattcaaatgtcttacgacccattactaaagtatgacctgttgataattttttaacatgcttcaaatcatttggtaggtgccaaggtaattgattttcaaaaccaattactcgttgcaagtcatgtgcaactagaatggataaagtcataattatcctccttcttctatcatttcattttttattactaagttatctttaatttaacacaatttttatcataaagtgtgatagaaataatgattttgcataatttatgaaaacgtttaacacaaaaaagtacttttttgcacttgaaaatactatgatgtcattttgatgtctatatggttagctaactatgcaatgactacactgctattggagcttttattgctggatgtgattcatagtcaacaatttccaaatcttcataatttatgtcgaaaatagacttgtcactgttaatttttaatgttggaggattgaagctttcacgtgctaattgtgtttgaatcgcatcaatatgatttgaataaatatgtgcatctccaaatgtatgcacaaattctcctacttcaagtccacattctttggcaataaggtgtgtcaataaagcgtagcttgcgatattaaatggcacacctaaaaagatatctgcgctacgttggtataactggcaacttaacttaccatcttggacataaaactggaacatggtatgacaaggcggaagtgccattgtatcaatttctgttggattccatgcagatacgatgtgtcgtcttgaatctggattatgcttaatttgttcaattactgttttaagttgatcaaaatgattagcatctttatcaacccaatctcgccattgtttaccataaacatttcctaaatcaccgaattgcttcgcaaaagtatcatcttcaagaatacgttgcttaaattgtttcatttgttctttatattgttcgttaaattcaggatcactcaatgcacgatgcccgaaatctgtcatatctggaccgttatactcgtctgattttatataattttcaaaagcccattcgttccaaatattattattatattttaataagtattggatgtttgtatctcctttaatgaaccataataattcggttgctactaatttaaaagaaactttctttgtcgttaatagtggaaatcctttagataagtcaaagcgaagttgatgaccaaatttcgaaatcgtacctgtatttgtgcgatcatttcgtgtatttcctatttctaaaacttcttcacaaagactgtgatatgctgcatcaaatgaattcaacatatgcgataacacctcattttcattatttatagtatgtatatttagtttgatataacttaattttatgtagcattttgttatcactcattttaggaatatgatattaatatcatgaattccgttactttatttataaaatgctgattaagtacctaccacatcgtaacgtgatatatgtttccaattggtaattgtttacccaaatctataactttaatgctaaaaaattttaaaaaagaggttaacacatgatttgaatattatgtttgatgtcctattaaaacagttaaatttctagaaaatatagttggtaaaaacggactttatttaacaaatagaatacaactatattctctattttcaatgacagacaccatttttaatattataaaatgtgttaacctttatatttatttatgtgtactatttacaattttcgtcaaaggcatcctttaagtccattgcaatgtcattaatatctctaccttcgataaattctctaggcataaaataaactaaatcttgacctttgaataaagcatacgaaggactagatggtgcttgctgaatgaattctcgcattgtagcagttgcttctttatcttgcccagcaaaaactgtaactgtatttgtaggtctatgttcattttgtgttgcaactgctactgcagctggtcttgctaatccagctgcacagccgcatgtagagttaataactacaaaagtagtgtcatcagcatttacttggttcatatactccgatactgcttcgctcgtttctaaacttgtaaaaccattttgagttaattcgccacgcatttgttgcgcaatttctttcatataagcatcatatgcattcatatttaattcctccaattaaattgttctgtttgccatttgtttccatactgaaccaagtgcctcatctccgttttcaatacgagatatggccatttcaatttgtaatttaacttcaaacgcattgtcattaatatgggcttttagtgcgggaagctgctctgcattaccttcatcaaagataaacatagcagcacgccacctaacgattttctgtggatcatctaatagtagcaccatttctggtagtgcctctggataccctaaatcgcttatgcaatcccctgctgttcttcttacagcaggacttttatcacgaagccccttatataaatacggtaaaatttctttactttcaatcatacctaataatacaatcgcttgacgtctaaccggtactttttcatcagataaagctaaatcaagtagcggtatatcttcaaaagtcggctttggaaaatggtttaacattcgtaatcgagtcttccaattatcagttgcatgatattcatccaaagagacatgtcgatagaaatgataattattagttgcgtgattttcttctaaagcatgttttaccaatacgggtaactgtgattctggataggtagctagcacttcttctaggacaccatccattacttcttcaatatttccatagcgatttcctaaatctagccatttacgcataaaaacaatattgtcatgtgctgtttgcgcttgagtcatatgatcaacatatgtttgtggtaattgttctcttaattcttggtcagcagaagttagcttaatttgatacggtatacccttaaaagttaataattcagctttaatttcaccaaaatgattgtcaatttgaggttcatttacagattctaaaaccttattcgcatcagaaaaagcagctttaatatcaggtaatatgacttcccaatcagcttttggtgccttatcaacagctaagaagttcatgacatgaaaaatggaagtgataccatctatagataacaactgatttataaatcttggttgtgtttcttctacttttttataagtattagataacttgtcttctcttgtatatgacaaaacaactttcattgtatttggacttggtgttggctctatacgtaaaatttccatatactttattccccccgaatactagttgatgaaaaatttattcgaatacagcctctgcttttggcaatactgtttcccaatttgcgtcattttctttatctactgaaataaagtccataacatggaaaattgatttaacgccttcaacctttaagatgtcattaataaatgctggctgtgaatcatcaactttagtatacgtatctgatgtcataccttctctgctttcactaagtgtaatcttcattgtgttgtggttcggtgtttctgatatagatataattttcatttgacttcctcctattgaagttcatttcctaattgttttatttctttccctattgaacactcattgatacaaaaatgatgcgccttcgttttcccctctaatttacgcagacgagttttgattggacattgattgcaataagtattcattaaatcatctattttcgcgagtgcattttgctctgaaaaagttaaaatacgcgacacttcctttattacttcaaaatattgcaaccttgtaaataagtgttactgttttaaatttgacataaaaatattataacatttttgaccctaagatttgaatgaaaccttttacaattctatacgtaaaatgtatttatattcaaatgctattgcatcgcaaacgatttttcagtaaaatgagtaagttatttattgagcggtttctaaacacccgcatgatcaaaatttaggaggacattttaatatgtataatgaaattttaggactagttacgtttattgcaacgttcgtacttatggtacttatgtatcgcttttttggtaaacaaggtttaattgcatgggttgcaattggcacaatcattgccaacatacaagtgattaaaactgtagaaatctttggtatttcagcaactttaggtaatgtcatgtttgcttctatttatttagcaacagatattttaaatgatatttatgggcgtagagttgcaaaaagagcagtttggttaggcttttcatcaacattaattatgattattgttatgcaattgtcattacattttattcctgcaccagaagatatggcacaaaaagcattacacgcaatctttgatgttgtgccacgtattgctttaggctcaattgtcgcatatattattggtcaacatattgatgtatttatcttttcactaattaaaaaagtatttagttctgataaaacgtttttcatccgtgcatatggtagtacatttttaagctcaataattgatacagctttatttgtagctatcgcatttatcggaagtttacctggtacagttgtatttgaaatatttattacaacttacgtattaaaattagcttcaacagttttcaatgtaccatttggatatattgctaaatcattttatcgtaaaggtaagattgataagttagatcaaggctattaacgcacttactacacaaaagaataagttttaagggagtgggacagaaatgatattttcgcaaaatttatttcgtcgtcccaccccaacttgcattgtctgtagaaattgggaatccaatttctctttgttggggcccacaccccaactcgcattgcctgtagaatttcttttcgaaattctctgtgttggggcccctgactagaattgaaaaaagcttgttacaagcgcatttttgttcagtcaactactgccaatataacatcgtagagcatagaacattgatttatgtcccagcctgaagatgattttttaggaagtatattacagtactacgtattagaaaatcatctttgaatcagcgagtattttaaacacgtgttacttatttaagtgatgcgtgttttttaatggattacccaacatattttgtattacagtaatagtaactttaactaagtattgaatagaaagtaggtttattatggcgaaaataaattttgatgctgcgacgaaaggaaatccaggcataagtacatgtgccattgtaatcaaagaagatgagcagcattatacatatacacatgagttaggcgaaatggataaccacactgcagaatgggctgcatgtatttatgcactagaacatgcacgtgaattaaatgttcaaaacgcactattatatacagactcaaagctaattgcagatagcattgaagctggttatgtgaaaaacgcaaatttcaaaccttattttgatcaaatagaaatatttgaaaaagattttgatttattatttgttaaatggataccgagagaacaaaacaaagaagcgaatcaacacgctcaacaggcattgtataaattaattaaaaagaataaataaaaggagcaccgactgatgtgatgtcaatcggtgctcctctatttatcaaagaaacaaattattttttatttttcttagatttctttttcttctttttggctgctacctttttagaagtattttttgatgctgactttttgtctttggattggttatctttttgatttttctttttagccaataataaaggaacgtcctcatctttagattcaatactagttgttgtttcaacatcttcctctttatctttgcgtcgttttgcgaataagagtggtgaatgttcgttatctttcaacactttttcatctgtgttttcatttgtaacttccacatcttcttcatcttctttacgacgacgttttggtaagaagaaaggcgtatgtttaactttatcgagtgactcgccattatttagcgaatctttttcttcaacagtaacatcttcttcatcttcttttctgcgacgtttcgcaaataaaagtggtaaatgttttgtatcgtctaaagtctcttttattgaatctttattattatctcttatttctaattcttcctcttcatcttctttacgacgacgtttggcaatgaagaaccagaaactagctagtaagccagagatacccaccacaccaatagcgtttttaataacattaccgaaattattactaaagtgacgcatatgaagtggatcaatgtcatcatcttcatcaattttctttttatgtccaatagtcgaactgttaaatggatgatttgcagttccataaccaattgttaaatggctattagattcatttccagtacttgacgattgtttagcacgatcagatattacaatttgtactgctgaaattcgagcaataccattgttcaatgcagcctcaacttgctgtaatgtatgcgcattattaatatctctaattgtttcaagcacaatttcgttaatttgattcattgctgcttgtttttcatcagttgtgccaatttcactatttcgaatactatttattttttcatttgaaaagtctttaattctactaattgcttcttgcttgcgtttagctagttcttttgctgttggattagctgctttcatttgagctttaaattgttccaattgctcagttatttcactgatgctttgcgcacgttgaatcgcttgaattgcttgttcttttaattgatttaacttagcaatagcttcttgcttctctttatctgttagatcagtacgagctttgatttcatcaatcatatgttgaattgcatcttcaatcgatttaattgcatttgattttgcttgttcaatcgtaaattgttctggattaaattgttcaatatgcgcttgttcttgttgttgaatttcttcaactgaatgaacatcaggtgcattgttaacatgatcaattgcttgttgtttaagcttattaacttctgcaattgcagcttctttttgttccagtgttaatgtcacactattattgatttcattaatcttttgttgtgccgcattttcgattgattcaattgcctgttgtttgactactgacaattctttttctacaacttttacaggaacattaacaatctcttttgatccatcaagcaatgtaacttcaacttttgctgttaagctatcagaaatcgttgcagttgatggtgtatcaataacttctgctgaaagctgatcaattaagtttatgtgtgcaagaatatcttgttctgtaatgatgtcatcacgatgtacaatgagttcaccattaactaggatttgctcaggtgttgcttcaaaaatttcatttacagcaggttgttcatcaacctcccatacatgtgtatttctaatgtcatctaaacctaagtttaatcctcgatttaattgatctatagtttgagcattctcaacgttttgtagtgctcgtttttcagcttcgtcaatttctttgagcgcttttgctttttgctcaggtgttaaatctggatttgaattgatttgatcacgcttcgcattagctaaggcttttattgcatttttcgcatcttctttagctttcactaaatctttgatgtcttgtaatgcttgtgcaagttgtgctttggcttgttcaatttcttctttagtcatcgcattgttaatgtcgttatgaccttgttgaagtatttggttaattcgatctttaagtgcttgtttttccttatctgttagatttggattttgatcgatttcgtcaattaaagcttgaacttgtttatcaacatcttgtttcgcatcttctttagctttcactaaatctttgatgtcttgtaatgcttgcgcaagttgtgctttggcttgttcaatttcttctttagtcagcgcattgttaatgtcgttatgaccttgttgaagtatttgattaatacgatctttaagtgcttgtttttccttatctgttagatttggatttcgatcaatttcgtcaattaatgcttgaacttgcttgtcaacatctttattcgcatcaattttagctttcggtatttcattggcatgcacttgttcaatcgcatggttgccagctgtttgaacttgagatacatcctgattacttgttgctttattaatgttgttgatgatgctgtttgccaattcttctgctttatttttcgcaataagcttgtcttgatccgtcgcatttgaagcttcgatttcttttagcttattagctaaagcttgattaatagattgaattgccttgtctttagcatcttgtagtcgttgatcaccattaagattatggattgcatcattgactgcttggattgcgccattgatatcattcacatttgtgttatcactatttagcaatgcatttgctagacgtttggcatcatcgaagtttgttttagcattatcgtcagcgttttggtaattgacagtttgctctgcatttggaatttcattgtcaactaaatgtttcaatgtttccattgcatcatttaagtcaatttgattattaacaatatctgttacatctgatacagtatcggcattgttaattgctttatgtgcaagatcttgttgctgttgatttaatccatttaacgaattaacaaacgcatttgctttatctttggcatttgcaaggttttggtctccatttaatgcattttgagcatcgataatattttgtttcaattgctctgcttcagcttttgcaattgcattaccttgcactttatctaactcatgtgctgcattcgcaattgcattatcataatttgctttcaaattgtcatctgcattgatgtaatttgtgctgctgataacaccaaggtgctgttcgtcaatatattgttgtactgcacccattgcattatctaatttagttgctctattaattgctcgagatgctttatttagcgtttcagcattattaatttgttggattgctaattgtctttgagcattgtttagatgtgttaattgatccaatctttgtaatgcttcagacttacgattattaagtctttcttcaccatttaatgcctgtttcgctgccgttactgcatcatttaatttgataacttgttctgcagttaagttttgaccagtcgatttatcaagtgcttgtttcgctttatcaaccgcttcatcatatacttgtttgacttgtgtatctgcattgacatatgcactgctcgcacgtgttgcatctttgtcagcaatactttgttgtaatgcatccataagttgatctaatgcttgtgcttcagtcaaatcttgcttaactgctgttctagttgtttcgctatcaattaacgtatcttccatatgtttttgtgcattgtttagatgtgctaattgactaaccgtttgtttagcatgatctttatcattttgtaatttcacatcaccatgtaatgctgctttcgttgtattcacagttgccgctgcttgattaatcgcattattatctaatgttgcagtttgttcattgataatattatttgcggcttgaacagcttgatcatagttttgttgctctggttgatcttcgttgatatatttgctatttgctttagttgctgcgttatcttgaatgctctgtcttaaaccatgcattgcttggttaagcgtattcgcattttgttcaatttgatgaactgcagttactaaagttgcagctgtaacttggtcttttaatgctgttttttgaggatcatttaagcttgttaaagcatcaattgcttgcgtcgcatttgttttagcaacttgtaaattatgatctccatttaacgcttgaagtgttgtttgaactttagtaatagcttgttctacttctgtttggttcgcattttgaccagtttgtttgttaatcattgctgctgcttcatttaccgctgtattataagcagtttgtttatcagtatcagcattgatgaagttaccacgttgttcaacggcttgatgatctgcaatcgcattaattaagttacccatcgcagtatttaaagattctgctgtttgtttgtgaccattaactgcagcaatatcagatgattgcgtaatttgtgattgtaactgttgcttttgcgcattattcaaatgatctaattgatcaagtctgttgtttgcttgttgtttagctgctgcaaggttttcatcaccatctaatgcaactttcgtattattcacttgtgtcgttgcaccattaacatcatctggattcatcgtaggcgatgtagtttgattaatgatattattagcagctgttacagctttgttatagtcattttgtctttgcgcagttgcatcatgataatcttcagacgctaatgtcgtttgattatccgcaacactatttcttaataattccatcgcatgatctaacgtttgtgctttttgattaatcgtagtgacatctgtaacaagtggcgcttgtgtaatttgactttcaaatgattgtttttgtgcatcatttaagtgtgttaagttcgccaattgttgttttgcttgttgttttgcatttgccaaattgtcattaccatttaatgcttgtttcgctgcgttcacttcattagtgatgctttcaacttgtgcttgtacttcattagtaccactttgtttattcaataatgcttcagcttttgctactgcctgtttatacgcattttgtttgtcaggatctgcatttaagtaattaccgtccgctaatatttgatctttatcattaatagcttgtgataattgatccattgcttgatctaggctcgttgctgtttgtttaacttggttcactgtagcaatttcaggcgattgatcgatttgaccttttaatgcttgtttttgagcatcgtttaaatgcgtcattccacttacggcatctttagcattttgcttttcagtggctaatttagcttcaccgtttaagctatttttagcatcagtcacttgagttaatgcacgagtaatgtcatctgggttaagcgttggatttgtcgtttgattgataataccttccgcttgagacactgcatttgtatatgctgtttgcttatcgacatcagcatcgtggtagttctcacttgctttcacagtatctttatttgcaataccttgtttcaagttacccattgctgtattcacattttgtgcattttgtttagtttgttcaactgtagctaaagcttgtgcttgattgatttggtttcgtaatgcatcacgttgtggttgatttaagtcacgtaacgtatcaagatttgctaaagcatcttgtttcgcttgcgctaatttttcatcaccgtttaatgcatctttcgcttgattcatagttgtaactgcttgtgttactgtatcaggcgccaatacaggtgttggtgtgccatttgcgatttgttgcgcttggttagctgcattgttataagcttgttgtttgtcttgatctgcttgtgtaaagtcaactgactgtggtacttgactgttcgcttgaatttgttgtttcaatgtacccattgcattatttaacgcatcagcattttgcttaatagcattaacacctgtaacaagttctgcatgcgacacttggtcttttaatgctgttttttgtggttgatttaagtttggtaactgatcaatggctgtatttgcattgtctttagcaacttgtaagttatggttaccgtttaaatcacccttagcttgattcacttgttgtaacgcttgagccacttgttgtggatccacgtttgcatttggtgtaccactaatgatttgttcagcatgtgctaccgcattgttatatgcattttgcttatcagtatcagcattgacaaagttaccatttgctttagtttggtctttatctgcaataccttgtttcaattgtgtcattgcttgatttaaatcttgtgctgtttgcttaatcgtgtttacatttgcaacagtttgcgcagcatcgacttgttgttttaatgcatctttttgcgcttgatttaaatcatttgcatttgtaatcacttgtttcgctgcatcttttgcacgttgtacattgtcattaccattcaatgcttgtttcgcttcgttcacacgttgcatcgcttgttccacttcagtttgacttgcattgctgccatttgctttagataaaataccttctgcatgtgaaaccgcattagtataagcatctttcttagcttgatctgcatcagtaaagttaatgctatttaatgtctcagttttatcttgtaatgcattgtttaagttagtcatagcattattcagattttgagcattttgcttaacattattaactgttgcaatatctggtgcttgttcaacttgagttgttaacgcttgtttttgcgcatcatttaaatgatctaatgtaccaagatttgtcttagcagcttgtttggcatcagctaatttttgattaccgttaagtgcttgatttgtatcattcactttagttaatgcttgttgaattgtatttggatccattgttggatttgttgtttgtttcaacaattcttctgcttttgttactgcattatcatatgctgtttgcttgtcagtatcagcatcgtgatagttctcgctacctttaatttgtgctttattcgcaataccttgtttcaattgtgtcatcgcgtcattaagcgttgttgccgcttgttgaatagcattgacgtttggtacatgtgttgcttgcgtaatttgtttgttgtattcatcacgttgcgcttgattcaagtttggcaattgatcaatagcatgttgaacattttgtttcgccgttgctaagttcgtattaccatttaaatcatttttagcttgcgtaactttatttaaagctgcagtaatttcgctaggtgtaacgactacatcaggcgtaccactaattaatgcttcagcttttgctactgcttgattatatgcattttgcttgtcaggatctgcattgacaaagttaccatcagcttttgtttgttctttatctgcaatgccttgttttaattgtgtcatcgcattgtttaactcttgtgctgtttgtttaacattgtttacaccagctacagtagttgcattttgaacttgttgttttaatgcatctttctgtgcttggttaaggtcattagagctattaattaatgctgttgcttcgtcttttgcatgttgaacgttggcattaccatttaatgcttgttttgctgcatttacttgttggattgcttgttcaacttcagtttgtgttgcattgccaccattagcttttgaaataatgttttcagcatttgtaacagctgtgttatatgcttgttgttttgcttgatctgcatcagtgaagttaactgttgctttcgtagcatctttatcggctatcgcttgtttcaagttacccatcgcagtatttaagttttgcgcattttgcttaatttgatttgcttcatcaacagtatgcgcaccattaatttgatcagtaacagcttgtttctgcgcattatttaagttgtctaatgaacctaaagattgcgttgcttgttgcttcgctgcctctaagttttcattaccatttaatgcatttttagttgtgcttacttgtccagcagcttgattgataacagtcggatctaaagttggacttgtagtttgatcaataataccttgtgcagttgtgacagcattattgtacgcatcctttttattcggacttgcatcagtataattttggttttgttttgttgtcgcattatctgcaatactttgacgtaatttgtccattgctgcatcaacattgtttgctttttgttcattaccttgtgcttctgcaacagtagtcgattgttgtaccaattgttttaatgcctctttttgtgcatttgttaaatggcttaaaccgtcaattgctgtatttgcgtgttgtttagctttttcaaggttttgagtaccattaagcgctgcttttgtagtattcacttgattcatagctgcttcaacttgatctttaggcacgtttgtacctgtagatttatttaaaatattttcagcattacgaaccgcttcattgtatgcatttttcttctctggatctgcatctgcaaagttttgactgccaagtgtagtgtctttatcattcaagctatttttcaagttacccatcgctgtattcagttcctgagcggtttgaatggcttgcgttacttcagctacagtgtgcgcttgattgatgtttccagtaacagcacctttttgtgcattgtttaagttatctaacgtagataatgtttggtttgcattgtttttagcatctgttacttttctatcaccattcaacgcttgtttagtagttgttacagttgaaagtgctgcttcaacttgtgattggttcgcatttgtaccatttgcttgattaataatattttcagcagcagttaccgcattgttgtatgctgtttgtttttctggatctgcatctgtaaagttaacactttgtttcacttgatctttgtcttggattccgttgattaaacgttccattgcttgatctaattgttcagctttagttttcacttgatttactgtgctaatatttggtgcatttgtcacttgtgtatttaaatcttgcttttgagcattatttaaatgacttaattggttgatgttagcagttgtttcttgctttttatttgctaagttttgcgcaccattaagcgcagttttgttagtgttcacttgattagctgcttgtgttactgcagatggatcaagtgttggcagactcgttgcattaatgatattttcagcacttgtaactgctgtattgtatgcattttgtttatctgtatctgcatcaacatatggttgactcgcttttacttcatctttattcgcaatactatttcgaagttgattcattgcattgtcaagatttgttgcattgtctttcacactttgtacaccagttacttgtgtcgcgctatcaatttgaccagtaatactttgtttttgtgcatcagataaatgtgtcatttgacgtaatgcatctttagcttgttgcttcgcagtcgctaagtttgaatcaccatttaaacttgtttcagcattattgacacgttgtgttgccgcagtaacatctgctgcatttgtaatcacattaggtgaaccatttacaatgtttttcgcagcattatatgcatcagtataagcaccttgcttatcaggacttgcgttagtgtaattaccaccagcaacaattgtgtcatgatcagcaattccttgttttaattgatccatcgcattatcaagtgatgtagcactatttttcagatcagttacacctgatacacgttgcgcagcgttcacttgttgttttaatgctgttttttgtggtgtattcaaatgtgtcaagttatcgatagcttgtgttgcttcagttttagcgcgttgtaagttcgcgtcaccgttcaaagcattttcagtagacgttacactttgaattgcttgttcaacagcttgcttatctttattcgtaccatgatctttatttaagtaagattcagcttgtgtgatagcattatcaaatgctgttttcttagttggatctgcgtcgatgtagttttcgctcgctttagtttgatctttatttgcgattgctgactctaatcgttgcattgcaccatctaagtcttgtgctttcgttttaacactatttacaccgttaactgttgttgcaccttcgatttgtgatgttaaatcttgtttttgtgcattatttaagtgtgttaatgtacctaaatttgctttcgcatctgattttgcttgtcttacatttgcatcaccgtttaaagcattcttagcagtcgttacttggtttaatgctgcttcaacttgtgcttttgtcatattttgaccgtgtgctttatctaaaataccttgtgcattcgtaacagcatttgtgtaagcttctttcttaccttggtcagcatctgtaaagttcacttgttgttttacagtgtcttggtcatttataccattttgaagttgacccattgctgtatttaattcatttgcagtattttgtgcagcagttacgcctgctactgtcgttgcattgtcaatttgactagttgctgcagttgattgcgcattattcaagttactatatgaagctaatgcacgtttcgctgactcttttgcttgagcaactttattatcaccattcaagtcatttttagcttgattcaattggtttagtgctgcttgaacttgtgtttcattcgcgttgctgccattagcattagtaattgcttctgcttgtgtaaccgcagtatcatacgcttgttgttttggttgatccgcatctgtgtaattgacactacgtttcgtattatccttttcagcaagtgcatgtttcaaattacccatcgctgtgtttaacgatgttgctttatttttagccgctgtgacagctgcaagatttggtgcttgatccacttcagcatttgccgcagttcgttgtgcattgttcaagtctgtcaaacgaccgatatctgatttcgcagtttgttttgctgctgctaatttttcatcaccgttcaatgcagacttcgcactgttcacttggctcgctttttggttaattgtatcaggattcatttcagggttattcgttgcactaataataccttcagcattagttaccgcatcattgtatgcattttgtaaatctgcattcgcgtcttgataatcttcgcttgatttagtcgcatctttagaagcaatactttgtcttaattgattcattgcttgatctaaagtaccggcattagcttgaataccttgaacacctgcaacagtcgtaccactttcgatttgcgatgttaagtttgctttttgagcatcagttaagtgtgacattgtcgctacttgttgtttagctgtgttcttcgcttcatttaagcgcgcgtcaccatttaatgctgttttagcattattcacacgttgtaaagcttgttcaactgctgctttattgtcatttgaaccagctgttttatctaataacgttttagctgctgttacagcatcattgtatgcagtttgttttcctctatctgcatcagtatatttctgagctgctttagtagctgcttcatcattaataccactttgcaagttgctcattgcagtatttaattcagatgatgttgtagacacttgatttacacctgcaactgttgtcgcaccttcaatttgcgttttcaatgcttctttttgtgcattgttaattgatgttaggttattcaatgcatttttcgcagttgtcttagcgttcgcaacattttgattaccgttcaattcgtttttagcacgttgtacattttctaacgcagtttcgacaccgtcttttgaagtatttggaccttgtgctttatttaaaatttgttcagcttgcgtcactgcatttgtatatgcattacgtttcgcttcgtcggcatcagtgaagttaacaccttgcttaatcgtattctgatcttgaataccatttttcaagttcgtcatagctgtatttaatgcatccgcattattttgtgcttgtgttacttcattaacatgcgttgcaccttcgatttgacgtttcactgcatctttttgagcgtcagttaagtcacttaagccgttcaaatgttgcttcgcatttgtttgcgcagttcttaagttttcttgaccgtttaacgcttgttgtttagctgtcacttggtctttcgcttgattaatttcttgcgcattcattgatggactagttgtttgaccaatgattgcttttgctgcagtgactgcactgttgtagtcagtttgtttgttttgacttgcatctgtgtagttttgacctgctttaatcgttgcttcattcgcaatgctatctcgtagacctttcattgcagtgtttaatgtttgtgcattatcacgaacagtttgaacatttggcaacgtcgtcgcttgacccacttgttctttaagttttgctttttgcggaccatttaaagaagttaaaccatcaattgcagtgttagcattttgtttcgctacttctaaattatgattaccgtttaactgcgtcttagcattcgttacttgcgttgctgcatttgtaacatctgctggtgttaacgttggtgttggtgtaccactaacgatattttcggcagctgtcactttttcatcatatgcttgacgtttattcgcatcagcattgacatagttaccactagcttttgtctcagctttatcagcaatggcacgttttaaagctgtcatcgcagtatttaattcagtcgcagtatgttcaacaccatttgctgcagatacacgtcctgcacttgttacttgtgcttttaatgcttctttttgttttgtatttaagtccgaagcatttgtaatcgctgtgttagcagcctgtttcgcacgttctaagttttgaataccgtttaatgcagtatttgcttgtgtaacagcttgcattgctctttcaacatctgctttaggtgtattaccgccagctgttttatttaaaattgtagctgctgcatttactgcttgagaataagcagttcgtttagcatcatcagcatcttgataattttgactttgtaacgtcgtgtctttatcacgaattgatgtttctaattgacccatagcaccatctaattgttgcgctttggctttaactgtattaacaccttcaacatttgttgcttgtgtaatttcattatctaacgctgtacgttgtgcattattaatgtgtgttaatgtacctaacgtttgtttcgcagcggctttagcttcatttaatttcgcatcaccgttcaacgccgtcttcgtactgttcacattttgtaatgcttgttcaactgctgatttgtctacattttgaccactagcttttgttaaaattgctttggctgcatttacagcttgatcataagctgatttcttacttggctctgcatctaggtatttctgagtttgtttagtttgtgcctcatcattgataccgttttgtagactgtgcattgcgttatttaattctgttgctttggcagtttcttgatttacaccagctactgtagttgcgccatcaatgttacgcgttaatgcatctttttgtgcattgttaattgatgttaagttattcaagttgtttttcgcagttgtcttagcttgagctaagttttgcgcaccatttaatgcatgttctttagttgtcacttgtgatgttgcttgcgtaatagtatttggttccatcgttgggttcgatgtttgattaatgattgcttttgctgcactaactgcgctgtcgtactcgttacgattatttggacttgcgtcagtgtagttttgacctgctttaattgttgcttcattcgcaatactatctcttaaacctttcatcgctgtattcaacgtttgagaactatttttaacagtttgaacaccatctaatgtagttgcactttgaacttgttcttttaattttgcttttttgtgcattattcaattgtgctaatccatcaattgtattattagcattttctttagcaacacgtaagttgttatcgccatttaatgctgttttagccgcattgacttgtgaagtcgcactatttacgtcattggctgttaatgtcgcatttggtgtaccattaatgatattttcagcgttagtcacttttgaatcatacgcttgacgtttttcttgatcagcattgacataattaccgcttgcttttgttctttctttatccgcaatagctgctttaagtgctgtcatcgcaccgttcaattcagtagctgtatgttgaacgttatttgcatcagatacacgttgtgcattgttaacttgtgtttttaatgcatctttttgtttttggtttaagtcatgtgcgttgttaattgtgttcgtcgcatttgttttagcttgagctaagttttgtgcaccatttaacgctgcttttgttgtattaacttgatttgccatgccattaatcgcattagcatccatatttggattgttcgttgcattaataacaccatttgcattatttacagcagtattgtaattatttttgttgctatcagatgcatcaagataattttgacttgttttcgtcgtattatcattttggatacttgtacgtaatgcacccatggaagtatttaatgtattacctttatctttaacaccatttacaccagctacattttgcgcttgttcaacttgatgcttcaagttgtctttttgtaattgtgttaagttaggtaaaccattaatcgtatttgttgctgaagttttcgcatttcttaagttttcagcaccatttaaagccgctttcgctcttgtaactgcatttaatgcattatcaacgtctgctttagatgtgttaccaccagtttgtttatttaaaatgccttcagccgctgtgacagcttgcgtatatgcatttcgttttgattcatccgcatcaagataattttgatttcttaatgtcgcatctttatcattgattgaaccttgtaagctattcattgcgccgtctaatgtattggcatttgtttttacagtattaacgccatcaacagtcgtcgcttgattgatttgaccttctaacgcagtacgttgtgcattcgtaatatggtttaaagtacctaagttttgtttagctgccgctttcgcttctgccagtttagcatccccattcaatgcttctttcgtacttgttacttgttgtaatgcacggtcaactgctgctttatctgaatttgaacctgtttgtttatttaaaattgctttcgcagcagctacagcttgatcataagcagttttcttactttgttcagcgtcacgatatttttgagtttgttttgttgcattttcatcatcaataccatgttgtaattgacccatagctgtattaagttcatttgcagtttgttggatacttgttacatttgcaacacgttgcgcacttgtaacttgtgcttttaacgcatctttttgcgctttatttaagttagtagcaccatcgatggcatttgttgctgtttgtttcgcttgcgttaaattatgtgtaccatctaatgcatttttcgttgatgtcacttgtgtagcgatttggttaattgcattagcatccatatttggattgcttgttgcattaatgacaccattagcactatcaacagcattgttatagtttgttttgttacttcctgtagcatcaagatagttttggccatttttcgtagctgtgttatcttgaatgctatttcttaacgtacccatagcaccatttaatgtgttggcacttgatttaacagtatctacacctgcaacattttgtgcttgttgcacttgttgtttcaatttatctttttgagcagttgttaaatgttgaagtccgtttatagtagtgtttgcatttgatttagcttgctctaaattatggttaccatttagggcacctttcgcatttgtcacttgtgacaacgcgttttcaacggcagctttgtctaaatttgatccactatttttatttaaaatgttttctgcgttcgcaacggcttgagtataagcagttttcttatctgaatcagcatcatgatagttttcacttgctagtgtatttgctttatcattaataccattttgcaagttagccatcgctgtattcaattgtgtacctgtattagatacagcttcaacaccagctacagttgttgcttgatcaattttagttgttaagtcacgtttttgtgcattattaattgacgttaagttatttaatgcatttttagctgcattcttcgcatttgtaacgttttgatcaccattcaatgcatttttagcacttgaaacattttgaatagccgcttcaacatcttgtttagacgtatttgcaccttgcgttttattcagaattgcttcagctctgcttaccgcatttgtatacgcatcacgtttagctttatctgcatcagtgaagttaacaccttgtttaactgtgttttgatcatggatagcttgttccaagttgcccatttgcgtgtttaactcagttgctgcatttttagcagctgttacctcactcacatgacctgcacggtcaatttgtgatgagatggcagatttttggttatttgttaagtgtgataacgtatttaagttttgcttagcagtgttttgtgcatttcttaagttttcagcaccgtttaaaccatttttagcattattcacttgtgttgcagcttgggtaatcgcactagcatccatagtcggattgttagtttgattaatgatacctttcgcatttgacacagcgctattatatgttgattggttattcggacttgcgtctgtatagttttgacttgctttgactgttgtttcgttagcaatactatctcttaagcctttcattgcattgttcaatgcttgtccatttgtttgaacagattgtacgtcttctaatctattggcttgtcccacttgttcttttaatttagctttttgaggagtatttaattgcgttaatgcatcaatagcagtattggcgttttgttttgctacacgtaatctttcgtcaccatttaattcttgtttcgcgctgtttacttgattagctgcagctgttacttctgaaggtgtcgtaacaaccgttggcgtaccgctaataatatgttcagcattggtaactttagttgtgtaagcattttgtttagtgctatcggcgttgacatatttactgcttgctaacgtattcgtcttatctgcgatggcatgttttaatgtgcccatcgccgtgttcagttcagtcgcattacgttgtacatcttgtgcattagatacgcgttgagcaccattagcttgtgcttttaatgcatctttttgatgttgatttaaatcagatgcgccattgattgctgtaatcgctgcttgtttcgcattgtttaagttttgcgtaccatttaatgcatgtttcgcattattaacattattaagtgcttgttcgactgctgttttcgctgtattcggtccagtttgtttatttaaaatggtttcggctgctgatacagcttgattgtatgcattacgtttttgctcatcagcatccaagaagttttggctcgctaatgttcctgacttatcgttgatagccgtttgtaagttacccattgcgccatctaaactatttgcactttgtttaacagattcaacaccagctaagtttgtagcttgtgaaatttgatttgttaaatcattacgttgagctgtagtgatatgcgttaaagtacctaaatgttgtttcgctgcgttttgagctgcaattaattttgcatcgccattcaatgcatctttcgcagtattcacacgttgcaatgctgcttcaactgcattttgcgcagtgtttggaccatgttgtttatttaaaatcgctttcgctgcagtaatagcattatcatactcttgttgtttatttgtatcagcatcacgatatttctcagatgatttaacttgagattcgttgttaataccactttgcaagctagccatagcttgatctagatgttgtgcattttgttttacagtatcaacaccactaactcttgtcgcactactaatttgactaatcaaattgttcttttgagcatctgtaatactcgttaatgtgtttaagtacgttttcgcattttgttttgccgtagctaagttttcatcaccgttaagtgccgttttagaactattcacttgctctgctttttgtgtaatcgtacttggattcatttctggattactatttgcattaataatcgtttcagcagcagctactgcgttgttatatgctgtttgcttatcattattagcatctacgtaatcttcacttgctttagtcgcatctttgttggcaatactttgtcttaacgtattcatggcttgatctaatgtattggcatttgattgaaccgtatgaacaccagcgacagtagtaccactattaatttggtttgttaaattcgttttttgtgcagttgttaaatgcgtcatattatttaactgctgtttcgctgtttgcttcgcttgatctaataaacgcgtaccatctaagttatttttagcagaattcacttgattcatcgcttcagtaacttgatctttcgttttattttgaccatttgatttatttaaaatatctttcgcagcttgtaccgcatttgtgtatgctgttttcttacttggtgtcgcatcttgataattttgactatttaatgtcgtttgttcgtcattgattgcaccttgcaagttacccatcgctgtatttaaatctgtaccttgttgtttaacagtatttacgccagcaatatttgatgcagcattaattttagatttaacagctgctttttgtgcattatttaaatgcggtaatgcatcaattgctcttgcagcatctgttttagattgtgctaatttttcatcaccatttaatgcatttttattagaagtaacagctgaagttgcacgattaacatcatcaacagacatcgttggatttgttgtttgattaatgattgtttcggcacttgaaactgcactgttatatgcattttgtttagctgtatctgcatccgcataatcttctgtacgtttcacttgatctttatctgcaacagcttgtcttaagttacccattgcactattcaagtttgttgcattttgcttaattgtattaactgcatcaatttgatgcgcaccattaatttgcgattgtaagttttgacgttgtgcattatttaaattgtttaaatgacctaatgcagtattcgcttcttgtttcgcagcatttaacttagcttcaccattcaatgcatgttctttacttgtgacatttgataaagcattgttaacatcacttggtgttataactggatgttgtgcattaccattaataatgtcattcgcatggttgtatgcattgttgtaatcatttttcttattagtatctgcgttgacataattatcactttgtacgacttggttatgattagcaacgccacgttttaaacctgtcatagcagtatttaagctttgagtcgtttgtttaatatcatttactgcttgcacgttttgtgcactattcacttgttgtgttaatgcattcttttgtgcttggtttaaatcacttgcatgcgtaatcgcatttgttgcttctgttttcgcacgttgtaagttttgttgaccatctaaagcatctttcgtcgatttaacagatgctgctttttggttcactgtgttaacatccatcgttggattagtcgtttctccaatgacacctttagccgcattaactgcattatcatacgcttgtttattagctggtgttgcgtcagtgtaattttgacctgatttaattgtattattatccgcaacactgtcttttaatttcgtcatcgcagtatttaaagccgtaatgttagacttaattgtttcaagcgcagcatgattttgagcagcattaatttgttgcgtgaaattattttgttgtgcttggtttaagttagatgcaccatgtaatgttgttaacgctggctgtctatctaatgttaaaccttgacgtgctgtatttaattgatccttagcttggtttgcttctgccactttatcattgatattttggacagttgggttgccattcaacacttgattaatttcagttaacttttgacgcgctgcttgtaatttttggttgtacgcatttaacgaagcggttgtcatacctgttgtatccgttggttgattaatgctttgttctaattgcgttttcgcagtttgaagcggcgctttatctggtgttaaagcttgacgtgcatgatctaaatcagatttagcttgatttgctgcagacgtatttgtattaatttgttctacagtcggtgaacctgctaatacttgattgatttgttgaatcttattacgtgcagctgttaacttcgcattgtatgcatttatagagtcttgtgtcataccagttgtacttgtttgcgtgtcaatactatgttgtagttgatttttcgcattttctaaaggcgctttatcgactgttaagccattacgtgcttgatcaagtgctgatttagcggcattcgctgctgtcacgttttgacgtattgtcgcaacatctggatgtgaggctaatacacgatcaatttcttgaattttagttctagctgctgaaagtttttcattaaatgctgcaatagatgcgcttgtcataccagtcgtactcgttggctgatcaatatcattttgcaactgagtttttgcagtttgtaatggtgccaagtctggagttagtccagcaattgcttgttttaagctattatatttttcttctacttttgttttttctgcggcaatttgttggtcagtcgcatcaccattgttaataacattttgtgcatttgttgattctgtttgacccgcacgtttagcattttcatatgcttggattgatgattgtgtcataccatcagtagttactgatttattgatttcttcatcaagtttcgtcttagcagttcttaaagcactattatcagctaaaggtactaattgattaattgcttgcgttaatcgctcattgacacgatttacatttgttaacgcagattgtacctcttgcactgttcttattggcttctgaatgatagcattagcgctatttttagcacttgttaagtcactttgaagtgcacgaatcgaattattgtaggcagtaatacttgccggcttcttaccagtcgttgtacctgtgcgattcaattgttgcactgcttgctctaaggcatgtgtatctgcagttaaatcatgtttcgcttggtttaatgctgttaatgcgttatcgacacgatgtttttcgtctgaaatttgttgtgcagttgcatcgccattgtcaataacacgttgagctgcagttatttcggtttctgcttcacgcttcttcgcattatagttatcaatactttgttgcgtcataccagcagttgatggtacttggttcacagaactttgtaagttatttttagacgttactaattgactattatcttctttattttgaagtaatgctttagcttcatttatcttagtttgtgcagcttgaactttagttaatgcgtcagaaacttgttgtggtgttgcacgctcattattaatcacttgttgtgcttctgttttcgcagaattgatttgttgttgcgcattatgcattgcattattgtactgcgtaattgtacctggctttttaccatctgtactaactggatcatctaaatgatttttagctgtgattaactcacgtttatccgcttttgtgaaaatggactcttgtacttcttcagtactaccatcattgtaagttactgtcacaggaatcgtcgttgtgctaccaccagctaaattagtaggcattgctgtgccatttttaatcgttgcagtacgtttattagcaacttgaactgcattgttaatttcagctgctgttacatttgaaccataatctttcacaatttctgttgtgttgacagtatgtgctgccggtgcagttaatgtacttggattactgcttgctgagtgacctgtacctgctttcggtgtaatggtaattgctgaatttggcttgatagtatttgcattgaacgtcactttacctgtatgtgcatctaacgttacataatctggtttattggcgattgtccattgattattttgaccacgaacaacattaagtgtcttactatgttccgcaccattaccaaccttttcagtgtaggcaatatccattacttgtgttggattaattaaatgtccagacgggttattaggcgtgatatcaatgtgaccattttgccaaattttcgtagtcgcttggttcggttgtggtgcgacaactgtgaaatcatcactacgttgctcgtcactgattgtttcgccactaccttgtgttgcaacaacttgaattgtatcagcaggattgaaagtacctgctggcacagtaataccattattagttccaacaatacctgttacattagctgctgatgcttctttcacccatgggctcgtattattacgacgtgtaaatgtcgttacaacatttccattacgtttaataactaatttgtcagcatatgtcgtaacattaccagcatgagtattgactgtttggttcgcaccaggtgcaattgtaatcgctcctgccgctgtttcagtcacagttggtttcgctggttgcacatcttttactacaaatttcgctggtaaagatgatgcaaaagtatgtccgttatagatgacatcatatttcgcattaatgactttagccgcattcggtttattcattgctgcccagtttgcatcgtttgtacccgttgctgcattattccatttatacgtaaatccatctgttggtaaaccagtagcattttgcatttgtgcatatcctgatgcttgcgtaccacttgctaaagtgccaccaactgttgttgtataaatagtttgagggaattcaaattgatatacgttcaaagttacaggaactcgtttagcagctgaaatacccggatatgtgacatcgacatttaaatgttgaacgcctgcttgttggttatttggttgttgtctatttgcccatgctgcagtgataccatttgtgtttgtatttggatcaaatgtaatgtagtttatcgcatccgttccattagtcaaattttgacctttcacatcacgtgatggcgccttagcattagcaactggataaactttgactggaacttcaacattacgcgtaccttgaccactaggtaatgttacaaccgcagttttatgagtgttaccgactgtattcttccatgtatctggactatcatgccatgcaaccgttgctccatgtggcgggttttgaataaatctttctacgtgtccgaaatcaaaaccgtcgccacctttaataaatacagcgccttcagtagttgcttgtaattgtggtgtcactgttactgttgcactgtcatttgaatcaacagattcatttcttgttacatctatcgctcgaccatgttcatcttgagtagtgtacgtcacattattcattgtgatagaagaccttgccttaatcacaccatttggtaacgcatcacttaccgttacaactgcagtattaccactaccataagtcgtgtttgtaatcgttaatggcgtattatctgctttaaataatttaatagatgaactacttaacacattattaattttaatttgttggttagtaagacctgctttataagtcacagagttgccatcaattcgcggtggatctggtttaacttttgctaaaatcttgataatttgcgtttggtgattatcataagtaactcgaatatcccttgttgaaataccaaccacatcattacttggtccatatgaatttgtaaattggaaattcatacgttgcgcattttgtgtccaagaatcattaactggtttaacatattgtttcgcatcatacacatcagatacacctgggaacacagcgcctctattcgtctcaaagacatgcttcggtactgtacttactactttatatgttgctgttttcgtaatcggcgttgtttcaccatcaattaagatatgtgcagttactgttatatcttcaccaatacgtgtattatctttatttggcgcttgaccacttacccaagtaatcgtcgcatctggaatggcactaccattagataacttaaagtaatctgatgcactagaaccattacctgctgggaagtcttggccttgtacagtgtaatgcgaatgtgcaacgatttctggaatgacatgctttacaggtacagtcactgttgatgttgttccatcttgataagtaacagttactgtgacattggcattatttccagtacgactgacattactaactgttttactagtgatttcattcgcacttgctcttgcataacttctatttggtactgtttcagtaaacgttaatgaattaataattgccgtttgatcagcttgtgatactgtcgcattattcgaaatattggcaattctcacaggattagcagccgttgatgaagtaccaactcgatatttatcacgcaaaggtttcactgttacattgaatgaagttgtagctgtattaccacttgtatcagttgctaataaattgattgtcttactagttgctgatgtcacatttggtgccgttgcagaaacatgttgatggttattatcaacagtacctgtaatttgtgatgtatttggtacagttacagattgcacaccaaagttatcattcgctgtaatcgtatttgtaaatgtttcacctgagaacacttgatgattagtgtaattacctactgaaattgttggattcactaaatcacttggtacaaaataaatgttaatagcgtcagtagtatttcctgtattttgatttaaatgttcaacatattgttttggaccatatggcgttaagtataactgtgctttataaactgcatcacttgcattatgtgtagaattactttttacaacgtggtcaattgtaaatgcgccagcaccattagctgccggttcgtttacgttaacaacagttgaattactatggtttgcacgagtatttgaatttgtaacaggttgcccaccataaccgtttgaagggttgatgatgtctaacacttgaatcacttgaccattcaacgtaaattgacgttgaccatcagttgtcgcatttgattgtgaataaccagtcgttctaaagttaggtcttccgccagcttctgcttgtgatttttcattaccagtaatgttatttcgcaatccaggcactgtagttgttgcttttaacattgttaaaatgtcattcgtcgtaatttgagtacctaatgtagcatcataacgataaattaaagatttatggtcatcagaccatgataaaccaccatctgttggtctgtttgcaatttttgcattcgtccatgtcactgtataatcttgtgggaaattaacccaacgcaagaaattcatattagctaggtttgacgcgaatgatttcgttaatcgacctttattaatatttactgtaatagtacttacattagcaccattaggtgtatttgtaactgaaatatcaccttcggcaagcgtaattacatctctatttgcattaataaatgcttgttttacttttgagatttcatcagtagttaaatcatatgttgacgtacgatatacacgttgatcgccttcaggttgtttcacatcaacgatttttaaactaatatagaaatcttcagtgtctttatgatatgcatttgaagcaactatatgatataactgcgtacctgcattcatttgactaacttcttgtgcagttggaatagttctatcagatgtaatatttgtaaatgtgccatttggaatagcttgtccattacttaaagtaaaatattgtttaatatcaccaatattaaatgattgtcctttagcaatcgttaccgttgctgttttagctgcattggcagtttgatattcagatttcacaactggttcgtatgtcatcacatttgtagcatcaagcgttgttgatgagccatcacggtaatgtaatgtgacattaccattattatcgacagttactggatcagttgatgctaaatatcctcttatattttggtttttattcataaaggcagtaattatgctttgcttttcatcattagatacagcagtcggattgactactacaactttctcagtatttcctaatacaatcggatgagcatcttcactaattttacctacatgaattgacacatgtttagattgactatcatttgtcgtattattgacattatctgtcgctgatactttaaatgtaatatcactgttaaacgcctgattcatactcactctacctgtaatagctaatgagccgtttttgttgtcggatttagttaaatttgatatccaaccattcggcaaagtagtaatagttgtattttttataccagaatgtctatcagagactcccattgtaaagttgacttcgtcgcctcgatagtatttggcatttattccaacaggattattgattgttggtggaatgtcatctggcaaaatagtaacagcattactcatattagatgcaactactttattataataaactactgctctaatttgtttacctacaggtggtatgaatacaacataatcttgcggtcgtatagtaattgtattatgcaccccatcaggtgtaccagtcgcaagtatcgtataaccagatggtatttgatctgcctcactaccaccattcgtagtttgatttgttggtgcaactaaataaaccaatgccgatggatccaacggtattcccgaaatattaacaggcactttttgtaatgctgtacctcttaattgctcagctgtcgttgtaattgttggtgtatgtggtttaacacgaatttcgaataattgttctttacgtccaaaacgtatcgttccaaagtaatcccctggtaataaattaccaacaagttcaatgttacgttctctagcattattagttctatttgtcgagttttcaatgtgtaatgtacgcggaatacctgtaatttgccaatctttatctgtaaaattctcattacttgttaaattaatacgtaatggttgaatagatgttacgctaccacctaaattcacggaagcattcccttggttacctgcatatacatagaaaactggatgcccagcttgttttgaaaatggtttttcagcaatgttttgagtatcgtcatttttaaagaatttaatattatgttggatttcaggtaataccgttaagttaacaggaactaaagtttcactattaccataaccatcaggatagtcgaaaccaatcattaatcttattgggtttctagttcttgctgcttcttgtaatttttgatcagtaaataattgacttaattgatattcatttaattcctgaacgccccccggtctaaaagcgttagtagttgcattagttgggtaaaaacctaacactttattactcggcgtcttaacataacttaatggatcatcaacaaaatcatctatatttaggtttgtactttctaatacctttttcgtttgtacatttccttgactcacttctacacgtttagttgtacctatgcgatatgtacgattaaccacttgtcttaaaccattaagacgttgttgatggtcttgcgttgattcgacgtatagttgactgtacataaataattgattgtactctaaagcacgcccacctgctgcatagtacaatttattaacagttggaccttgtgttttaaatgaaattgtataacttgcatcaccttgaccgatgaaagtataaactttaggaacacccggtgattcagcaggtttttgaccattaatatattcaaaattttgtctaccaaatgctttagtagcagctgttgctccagcttcactaaaataatcactcgctctagataaatcttctaaagaataaacatggacagttggccagctatatattacttggccacttctatttcttattttaaagtcatgtgaacgatcaggatcatttactccatattcccacatttgttgaagtggtttatttgcacctgctcctgctccatgactccattgtacatttgttccatctgaattaactgttacaaagtcagttcttcctactggcacttggtctgctggtaatgcaaaccagaaaatcatattttgatgtggagcatgtcctttattaaacttaataacccattggtagccatctccagtttgtttcgctgtcataagagcaatttcctttgagtcagaggccttcaatgtattccatggtgtagttggtaaattatatggcgcccctttactagaagcattgatatatgtacctacaggatatcctgaaccatcattagcattttcaacataatatgatgaatttgcattttgatagtctgatactgatctaggctctgcagctctagactcaacagaacgcgtttgaattctgtttgatcgacggctagtttgttgacgttgaggcattgtacgaattaaagcaacagcttgttccaattctttgtatgcaagttgcaagtctttattgtttattggatcattactgcctaataacgtattaatcttatcaaaaatgccttttacatagttaaatgtgccagaatctgcattttcacggtcaataaagcgataatcatgataatttgcatcaaaaaatgcttgtaattcatttcggtcatgttgtacgttaccattatcagatgaatctgaagctgttactacatttgcttcatgattttctaaatgagccgctctattgtcgtttccatttttattagcagattgactttcgttttgtttatgcttaccttcttctttatctggttgtgttgtcgcagccgttgccgaatctttctttgtatttacattttgagatgctggttgttcatcattagtagtagatgattgcgctactttttgatctactaaattagcttgactaatatttggttgctcattttcatgagtagcagataatgattgactattttgtgaattttgagaattttgtacttgagattctcgattctcagtctgttcattattactttgttgtttctgtttaaccacgcttgctggttgatttgtttcagcagcatgtgcttgtgatgtattgaatcctaaaaataccaatgtcgcaatgacagttgaaaatgtaccaactgtatatttacgaatactaaacttttgaattttatcacgataattcacagctattgttcactccttatcttgttgttatgtctctgttgtgttgtgaatgtatttacttttgattgcttgtatattgtaatgctcattccattctcatttaaaaatttaaaacgatgacgattcaatacaatttcgcaatctatccaaaaagtattgaaacacattacaactatgtgttgaacaatttatttatgctccagaatataataacacaaaatatattgtatggtaaattgaatttgtgacaatttataataattataaataaagtagcgtaaaagagtaataaaaaaccaatccctatgttcatttaaaataatgacacataagaatcggtttatatttttgtttaatattgtagcgacttgtatgatttcaatttaattctcaattatcataattgagtgtcgttttgtttaggcacaagtaacaaaatgataacgaatgataatattcccatacctgcatttaaccataatgcaatcattgcacctgtataaatgtttgtcatatttgatacgattgcatatactgcaccactcaatgcgacgccaaatgctccacctaatgcagaagccattttatagatacctgcagcaacgcctactttttctaacggtgcatttgcaattgctgtatctgttgatggtgtagcatatatccctagtcctaaaccaaagaataaataacctataatacaacaaatgacatacaatatttctggcaagaaagttaatgaaatgagacattctccgacaataagaactcctgttccaattaacattggtttcttgcatccgagtgtttgaagtaacttttcaccaacacgaatcataattagtaccattactaaataagtgattgataaacttcctgcttgcaatgaagaatatcctaaacctctttgaacaaatgtgttggctactattaatgttcctgcaacaccatttaacaaaaagtttgaagctgttgcacctgtgtaagctttatttttaaataatttaaaatcgattaaaggatttgtagcacgcttttcaagaactataaataaactaaaagatccaattgcaattgctaataaagtgataaaaagaagtgaggttacacctaattctgatcctttagtaattaaaatatttaaactgaggagcataatgactaaaagaaccagacctttaatgtcaaatttatttagagaaatcgatttagatttagtttcaggtgtgcctttaataagaaacagtgcaattaatgaaattataattgataggatgaaaatccaacgccaacctaaaagcgttgcaactgcacctccaaaaaatgaacaaacaccagagccgccccatgagccaattgaccaataacttaaagcgcgttgtctatctttcccaatgtaatatgacttaataatagacaaagttgcaggcataatacatgctgctgaaagtccttgaattaatcttcctataataagtaataaaggaatatttgaaataatgattaataatgaacctaatatatttaagataataccaatgttcgtgagtttaattctgccatatttatcagcaagaccacctgctcctactacaaacattcctgaaaataaagcagttatactaacggcgatattaaccgttccaatatctgtattgaaactatcttcaagtattggtacaacattaaccaatgattgtgcaaatagccaaaacgttattacacttaaaacaattcctattaacaacttattattgccttcaaatgcctctcttgacggcttttccatctctatttgcctccctatacttttgaaaaacagacaaattccataacagaaatttgtctgttcgttagaataattgaatggttttaattttaatgtgtaaaactttaaatttattagtagtccatccatttattctcaatgctagttatcttaccttatgctgctttttgtttcttcttatagtaataaactggtataccaagtgctgttattagaattccaatgattgctaatataaattgtgtaaacagtgtattaattaatacaaaagatcctgccaaaatagcaattaaaggtatgatcggatataacggtactttatatggacgctccatatttggttcacgttttcttaaaattattacagcaacaaatgacatacaatagaacaaccaaataacaaagattaacatgtttgtaattgtatcaaatgctcccattgacatcatgatgatagcgattataagttgtataattgcgccaaaccatggtgcgccagattttgttaattttgcgaataagtggctaaatggcaataattttctttcagccattgcatatggtacgcgcataccagtcatagtatagccattgatcgtaccataaacagaaattaatataccgattgtaataattttaccgccattttcaccaaataatatttttgatgtatctgaagctgcatttaagttaccagcaagtagttctattggcaacgttaataaaaatgtagcgttaattaataaatatacagccataatacaaccgataccaactgaaatcgctaaaggtaaatcgcgtttaggatttttaagttcccccgcaacatttcctacatgaatccaaccatcatatgcaaacatagttgctaataaaccactaccaattgctgtaaagaaaccatttcctgaattacctgtagttggaattaatgaaaaagtgatatctccagattgaaaaataccaaaaattacaataacgatgattggaatcagtttaattactaaagtaactgattgtaaaattccgcctgcttttgaacctaggaaatttatcaacacaatagataacgcagatgcgattgctattggtattaacgaacctatagataaatggaataaattaattagctgtgtcgcaaatacgatagacaatgctgctacgttagctggaaaataaataaatgattgcgcccaacctgataggaagccccagaaatcaccgtatgtatattctatatacttcgttaagccacctgtttcagggattgcagcagcaagttctgctgctgttaaccccgcacaaatggtaatgatgccgcctaggaaccatacaaacaaggccattcctgctgttcctgttacttctgttacgtttgatattttaaagaatactcctgaaccaataactgtccccataacaatagcaaacgctgagaagaaacctatatttttttgtaattctttaccatttgacataattacacctcatttttaagattaaatgttttaacctaccacacccttgcttgtatctgcaatattcagtccatgttcaatgacacctgaaactctagttaagtcaacattcccgcctgaaactaaagcaacaacatttttatcttcaagccatttattgtttatttttccacttaaaattgcagctgttggtaatgcgcctgcaccttcagtaataattttggcacgctgcattaaatctttcatagcatgttcaatctcttcttcagtaacaagaataaattcatctactaaatgtttaactacttcatatgtttgttcaccaggaacttttacatcacaaccatctgcaattgtgctatcttcacgatgttcagttaaatctctcttatagaatgactctgccatgccatgcacattttcagcttgaacgccgataatatgaattgatgggttaaatgattttaatgcggtggcaatacctgcaattaatcctccaccgccaactggtacgatgactgtattcacattccaaatatcatctaaaatttctaaaccaattgttccttggcctgccattacaaacttatcgtcatatggatgaacgattgtcatgccattttctttcgctaattcttccatataaagtctagtttcgttaaagtttttaccttttaaaataacctttgccccatagccttttgttgcttgttgtttcgcttgtggtgctgtttcaggcattacaatcgttgcatcaatgcctaataatttagctgttaaagcaacaccttgtgcatggttcccagcagatgctgcgataatgcctttttctttttgttcatctgttaagtgattaattttattgctagcgcctctaaatttaaaagatcctgtgaattgcatattttctaattttagaaatacattccctttagttatactttggcttaaatacattgatttaattagaggtgttcgacgaataaatggtttaatgcttgctttagcttcttcgatatctcctaaacttacaatatgtgctgtttgtaatgtaactgtgttggttgtcataataattacatccttccgttttgtaaatttttagtccaaactataatgctatatttaaaatattcatttcactcaatttcatttaaattactatctattcgataacatttaatatttctttataatttaggtcatgtgatgaagctaatccttgatttgtcacttgtccttggtaaatgtttacaccagtacttaaggcttcattatctttaattgcttgttctaagcctttgtcacaaatttctaatatataatcaatatttccttgtgctaatgccattgttgaagttcttgggactgctcctggttggtttggtacaccgtaatgaatcacaccttcttcttcatacactggatcagatattgtagttggtctaattgtttcaatagttccaccttggtcaatagctatatcgattaatactgaaccttttttcattgatttaaccatctcacgagtaaccaattttggcggtttcgcacctggaattaaaattgtagaaataaatacatctgcttttttaatttgttctgctaaattttctggtgttgatttgactactgtgacatctttttctgcatacatatcttcaagatatttaatgcggtcatcatttaactcgataatgattactttagcatttagtcccaaggcaacatttgctgcatttgttgctgctacgccaccaccgaaaatcacatatgtactaccaggtatatccacattttcatgtacaccagtcactaaagtaccttgaccaccatgttgtgcttcagagtagtaagctcccataattgctgagcgttgacctgctatagcactcattggcgctaataattctgcttttccattttttataatggtttcaccactaatcgcagttacaccaacttcttgcattttttctactatttcttttgaagatgctaaatgtaaaaatccccagataatttgattctttttgaaatattgatattcgctttcatgaggttcttttactttgataacaagatcagcttcccatgcttgttcatgagttacgatcttagcgccttctttttcatacatatcgttagaaaatcctgaaccaatgccagcatttttttcaacaattactttatgtcctgcatccgttaacttacgcacattttcgggtgtgcaagctacacgtccttcaccttgttttaattctttgactactgcaactaacatttgcaacactcctctttcatttgtgaataatttcacaattattttatcctttggttatgaatatgtaaataccattaattaattattcatattttatctataatttgttaataaatatttaatatattattcttattcttaaatattatgtgcaattataccactatatttatttcttatactccatttgatttatagttgtattaatacattgactcaaaaactaattaatcaaatatgtttttttagattaataaagttgtaactgtactattttgtagtgtatggtaatttatttggatgaaatataattctttatactctattgattaatcaaatatgtatctatcaaaattcggcttatttattcactctgacatatccaaatacgcaaaaagactatttctaccttgtatcgatagaaatagtctttttatacttaattggtttaatttttcataaaatcttatactttttaaaaatgggatgaaatatattttcctgaaacatgtaattcatgttcgttacaaattgataaaatatgattaagcgttgttgcaaatgacattttctcaaaaagcgcttcactatcaattggtacttgtgtgtgaatttcagccagtcgcttcgataaatatagttcatctaaattgtcattaatcttattacgttgcccagctgataatgcatcaatgttttcaaccacattttcaacgctttgatattgctgaattaacttaatagccgttttctcaccaattcctttaacacctgcatatccatctgctgtatcacccataaacgctttaatatcgattagttgttgtggttcaagggcatattcttcgttaaaacgatgtaatgtatatctattataaatgttaaaaccttttttaattagccagacttcaacattgtcattaatacattgcagtaaatctttgtcgcccgtaataatatagacatcgttatcagttgaatattgttgtgctaatgtacctataacatcatccgcttcatagtttttaacgccaatatttacaaagccaaattgctctgaaatttctttaacataatcaaattgtggtatcaattcttctggtggtgcagaacgattttgcttataaccatcaaacatatcatttctaaaagttgattgtcccatatcccaacatacagctacatgtgtagggcgtatttcatgtattgccgaaaagatatgacgcacaaacccttgtattccatttgtaggtacaccttgtgaattgtacataaattgtttatgaagacttgtagcgtagaaatgtctaaataatagtgccataccatctacaagtaatattttattaggcatttaaaacgttccttctttcttaatataaaatagttttcagttgttgatgtttatctttcaattgattgataagtgttgtatctaaatcaaatgctaataaatcgtttatttgcgtttgaatattagcttcaaaactttcaaattgcgattcagcttctacagccatttgcttaacatataattcaagttgttgcctcaataatcccatttgtggttgtaataatcctaacgtactttgacaaattgattcatgtatatctctttgcccatttggattcaaaattttacgttttgttaattgtttaggcaatgcatttagcatatcattgaaatcgatgtgcaataatggttgctctatattagctgattcaaagttaaactgaggattaacaatgacatgtaaatctgctaattgttgaacgattggtgcaatttgctcagtgagttgcttattaaagtatttttttatacgttctgtaattaaagattgctctaaaaacaatcgttgatgaatttgatctaagtatactttcgtagacactttcttttcttcattaaaatcactattttgcgtcatttgagaattaaacactgatttaacatcgtcaagtagttgtaattttaaacgtgcatttaaatgataaacttgttcttcaacttcgttgtctgtatgttgtaacgtcgcatcaattaattgatgttgtaaacgctgtttatctttatagactgttaacctttgttggcgacgtgaaatatcagctttatttgtttcaaattctgtaatcatctctacataagaacgatccatttgtttaagctgatgaatcatttgttgttctaaaattgatttagattcaacatcaacaaattgttgtatgctttgttttaattgatcaatgcccttatcttcagcttgtaatgcatttcgacttgatacagcaaaaatgtctgattgtaagtgtacttgtcttaatgcatctgatacatatgtttcaaccgcttcaagatcatcttgactttctgctaaatcagcagcattaattaccattttaaatgcttggttttcattcaactggttcatatctttcatgtgttctataaacgccttgtcattatcagtaaatgaatgattaaaataacttacatacaatattaagtctgaagaagttaaaatttgctcggtttcatttgtatgcctttggttatttgagtgtagccctaatgaatcaacaattattttaccttttaaccaatcatgcattaatgcaatgtgtactgttttaacaaatgttgcgtattcatcttctgcactccactttttcaattcttgttgattaatggcatgtttttcaccattttccaacatattgacatacaaattataatgtttttcaactgcatgtacaaaagcgagttgatttttatttaaatgtgattttaacttttctaaatctgaattaataaagtcttctatagttgaaaaagacatatcttggtattcaactactgcattaatttcatctaataattgcgattgtgattttagcgttatataactctcgtctccataagatatttctgtagtagctgctgtagtaggatttggagaactgactaaaatctgctcgcctaataatgcatttatcaaactacttttaccagcactaaatgttccaaatacacctatttttattaatttattatctatacgtgttaatgtttcgtggatatcttgctttgtacgcttgaacaaaggcacatccgaaattatatcaagcgctttttgaatatctatagacatatttgttgtagctgtattttgatttagctgctgattatcacgattatcctgagtattatcagtagccacttgatatgttgtctcttgtcgacctattaatttatctagagattcatctaaatgaatatagtagtgacgataattcttagtcgtcaatgactgacgcagctcatttaattctgtataacgttgatattcttttaaatcatcactttcttctgttggtaattcatctgcctgtacattttctattatttctttaaaaattggtgttgattgttgttcaacatatttcttaatggctttaaccacttcgtctgaaaatgtaagtacataagtattgctgattgatgtttgtggttgatataaatcttcaatcatttccggcttaacgtcataatgctgatttaatactttatctgaagcttcttttttattgataaaacgcgttacaaatgacatatcttctcgcattggttgacgaatttgttgattaacatgttcttgtaacgcatctgtcgctgttaataatcgctgttgttgaatttgtagctttttcttctttttattaaaaaacccaccaacattaaagtcttgagacatactttccaaataacttcgtaacatttctctcatattatgcggcataatgtatgcattttctaaaatatttttacgcttattctttaaaaatgccattaattcatctggattatttaaaagttgtgcctcttcactaattgcttgatgttgttgactatttaaaaatgcttgttcaaactccgcttcttcgatacctaaatcttctagtacttcctgaatttcagactgaatgtaatctagctgagcttcggtaatgtattcaaccgttcttgatgtataatcctctattgtctctctatgttgatctaatgaaattagataacttgataatacttcaagttcattttcagggtgatcaaatttagatacataaaaggtgcgttctaatttaatgccccaatctgcaattgatttttcaactcgtgatttaaacgtagagaatgacaattcatcgtcttgatgcttgtcaatttgattaatgataaacacaacaggtattccaacatcatttatatgcttcataaacttaaagttaagttcagattgaacgtggttatagtcaaccgtataaaatatcatattacttgtatacatatattgttctgttattgactgatgtgatgcaacatttgaatcaacacctggtgtatcttgcaacgtaaacccattttcaaatttagctgattgaaaattaatttctacagattcaacgtcgacattttggcgattcatttcccttacttcatcataattagataatttggcatacgtttgattcggcaaattagcaataatatcgtgattgtctgaaactgacacaatagcagtattacttgtcgttggtacaggagaacttggtaagatatcttgttcaattaataaatttatcagtgtcgatttacctgcagaaaaatgtccaacgaacgaacatgtatattgctgcaaatatactttcttaattacttggttaattgtatgtaaaagtgcttcatttcgcgacttttcaacttctttttttaatttatataaaagatctaattgttctttattaatcatgttactttcccctttggttcgttcacatagaaatgcttgcttgttaaaacgaattcatacaatatcgatgtccatttaaacaaagatcgttgaatggctcgcattgtattatgtttaaattttatcatagctgcttgataaaacatacgaataatcaattttcttcaaacattccaacttaaaagttcatttttctaaaaatcacaaatcatcgttaaatttttctaaaaaataaatattgtcacagtttgttcacacacgtcacagaattgacaccgtataatagccaattgggagggaaatatgaaaaatacatttaatccattacaaagattacatttctatgcagcaatttttattgctccactgttaatcactttaaccatttcgggcattggttacttgttctttccagaagttgaaaataatatttataagaatgagttttttggtgacagtgatgtaaaaacgcatcaaacattaaatgatgcagtacatcaagttgaacaacaatatgaaggattctttgtaagtaaagttagcatacttgatgaaccatataacaaacgaattacactgagtgatatggcaggaaatcaacgttacgtctttctagatcataacaatcaatttgttgcagatcaaaatgcgaaacatacgtattctaatgtgatgcgaagtatacatagttctttgtttactgaaaatactattattaattatttagtagagttaaccgcatgttggacgatattcatgattttatctggtacttatttactcattaagaagcatttaatttctaacaaaggtaaggcacttcgttggcaaaagtggcacgcaatgattggagttatcattgcaattccagtatttgtattagttttaactggattgccatggtctggttttatgggcagtaaaattgccggtatgatggacacaaacggtgaccttggtcaaggtgaattagcgattaatccacctaaatcagatttgaacgaattaccttgggctacacgtaaaaataaacagccagcttcatccgaaaaaggttcaagtggtcatcatggtaatgcagcaatgcctcaaaccaaattagattatcaaatatctattgataaggtcgttgaacaagcgcaaaaagctggtattaaaaagccgttttcaatcgtatatccaagtgataaaaatggtacctttattgtatctaatactagtaattcaggtgatactgggctagatgtatcaccttacaaggaacaaacactttatttcgaccaatatagcggtaaaaagctaggtacgattaaatatgatgactacggtattattgctaaatggtttacatggggcattccgcttcacgaaggtcatttattcggcattttaaataaaatcattaatttatttgtatgtatcgctttattagtagccattggcatggggtttgtctcttggataaagcgtacaaaaaatactgcagtaaaagtaccacatcgcgtaaaaaaaccagcatctatatcactcataatatgtttaattgtattaggattattaatgccattatttggattatcacttatccttgtatttataattgaattaatattatatattaaagatcgtcgtgctaaacaataatgcacttaaagttttgaactgacgaaatttacaaaatgattctcgtctctctaattacttaaaacgggttctataataaatcgtactgatggaaagtttttactttttatctgtcagattttttgaatttgaagataaaaaagcatctaaaacgcataagaagataactctacttcttcaaaattacgttatagatgcttttttattaattcatatgcatgtcgtgaattttcatcattaaaccgtgtgggacgtcatcatgtttaacaatctcttgtttataaaatgtcttcccatcatctttagaaactaattttacaaagtctccttttttcggcttgaaatcattagatggttctactttgatattatgtttgactaatccatctttttcactgacaactttttctgcatttgtattactattcatataaccaaaataagtcgttttttgactagaaaaaatcattaaacatacaacggcaataccaataacaatcaatgcaatagataaacctagacccatttttttacccatttatagactcctccatttttcaaaaatacctattatcatgagaacttaattattactaattttagtcacgcattagaaacactttagttttcaatagttttacgttctgtctttttaccccagtattgataataagtacattctatatatccattaaataacttacgtcgctttgttgctttacgatctactaaatattcaaattctttattacttgttaaaatgtatgtagataaaaatggatgttgtttcattagtttaccaatataacggtacatttcttcaacttcttcacgatcaccaatacgttcaccatatggaggatttccaattaacgccaccggttcttctgtatcaattgttaatgtattgacatcttttgcactaaatttaataatatcagacaacccaacttcttcagcgttacgcttagcaatctctaccatttctggatcgatatcagaagcatatacttcgatttctttatcataatcagccatcttatccgcttcatcacggtaatcatcataaatatttgctggcatgatgttccattgctctgatacgaactcgcgattaaaaccaggtgcgatattttgagcaattaaacaagcttctatagctattgtacccgaaccgcaaaatggatcaattaaaggtgtatcacctttccagtttgcaagacggattaaacttgctgccaacgtttctttaattggtgcttcaccttgtgctaatctatatccacgtctgttcaaaccagaacctgatgtatcgatagtcaataatacattatcttttaaaatggcaacttcaacggggtatttcgcacctgattcatttaaccaacctttttcgttatatgcgcgacgtaatcgttcaacaatagctttcttagttatcgcctgacaatctggcacactatgtagtgttgatttaacgcttctaccttgaactgggaagttaccctctttatcaattatagattcccaagggagcgctttggtttgttcgaataattcgtcaaacgttgttgcgttaaaacgtccaacaacaattttgattcggtctgctgtgcgcaaccataaatttgcctttacaattgcacttgcgtctccttcaaaaaatatacgaccattttcaacatttgtttcatagcctaattcttgaatttccctagcaacaacagcttctaatcccattggacaaactgcaagtaattgaaacatatatgattctccttttatacaggtattttattcttagcttgtgttttttatacatttccaacaaatttaatcgctgatacattaacgcattcgcttattattttaaaacaaggcagtgtcattatatcaagacaaggcgttaattttaagtgttcttttcatgaaaaaagctctccatcatctaggagagctaaactagtagtgatatttctataagccatgttctgttccatcgtactcatcacgtgcactagtcacactggtactcaggtgataaccatctgtctacaccacttcatttcgcgaagtgtgtctcgtttatacgttgaattccgttaaacaagtgctcctaccaaatttggattgctcactcgaggggtttaccgcgttccaccttttatatttctataaaagctacgtcactgtggcactttcaaattactctatccatatcgaaagacttaggatatttcattgccgtcaaattaatgccttgatttattgtttcatcaagcacgaacactacaatcatctcagactgtgtgagcatggactttcctctatataatatagcgattacccaaaatatcacttttaaaattataacatagtcattattagtaagacagttaaacttttgtatttagtaattatttaccaaatacagctttttctaagtttgaaatacgttttaaaatatctacattatttgaagatgtatttgttgttgtattattcgaagaaaaacttttattgtcctgaggtcttgatgttgctacacgtagtcttaattcttctaattcttttttaagtttatgattctcttctgataattttacaacttcattattcatatcggccattttttgataatcagcaataatgtcatctaaaaatgcatctacttcttctcttctatagccacgagccatcgttttttcaaaatctttttcataaatatcttttgctgataatttcaatgaaacatctgacattttttccacctcattagaaactttgatcttcagaccactgtaagtcattgatgaatgctgttaattcatcgaacgtcacaatatcacaagtatagtttgttttatccataaaatcaactaacatctgcttgaagaacttaggacttgcctcttgttcctcatcataaatgagcaatgtttgatccgaatgttcaagcataaattgatctgcttgtttaaattgaaaaggaccctgatacgacgtatgaaaaatactatcaacataatctgcatgcttaattatgttggcatacttactttgattatgttcattccacttttctgtatgtccttggaacggtgtaattacagcaaactttaacgaatcatatgttcgttgtaattcaataacaacttctgcagtccataattctatacccatttgcccttgtattaacacccattctaatccttcatccaacagttgttcaattttatgttttataaattgttttaaataatgtacttcaggtgcgtcatctttaaaaatgtttaattcgaatgatttgtaacctgttacataaactgttttaaccatgagtaccctcttttgttacgccatctaatatattttgtaaatcatattgaacacttttaagcttttctataaataactttcgacttgttcgcttaaaatgacattcgacagaaagttgttcaatgttagcaatcagtagctcaaatttccttgaattcatataaggtacttctataataaattcacgatgtaatttgatctcattgagcatgctatcaatatgttcagtatatggctttacagtttggtaaaaatcatgatcttgttgttgtgatttcacattttcaaaattttgttgcatgttgttaacttcataaattagtgattcgactacatcattcatgaggacgcctcctacattttttaatttatcacaatatactgtattcgtcatgttttaacactctatataatttgatttaactattttttcaaatgtgttatctgttaaatcaagtaaatctaaaacttcctatataaatacaaaattttatcgtgtatgttgttatacgatgaaaatacttttaatctaataaaatcatttaaatcaaatacacctctgctgattaacaacacatacttgtacttgcctcaaaaataaaaattactgatcatgatttgacttttataacaaaattcaaaaatattgtaatgagtattcatttttataagcaaaacttttcaattaattaaaattgtgtgtaaaattccaacattaacggtaaatgtattataatattattgtgttaatgctgaaatcacgttaaaataagctttggtgtattgtgtctttcgcatttatactaatttaagtttggtgtttcactataatgttgtgtataataaacaacgtttactaccaaacttgtgtggtgaaatttatgaattatccaaatggtaaaccatatcgtaaaaatagtgctatagacggagggaaaaagaccgctgcctttagtaatattgagtatggtggacgtggtatgtcacttgaaaaagatatcgaacattcaaatacgttttatcttaaaagcgacattgcagttattcacaaaaagcctacgccagtacaaatagttaatgtcaactatcctaagcggagtaaagctgtgattaacgaagcttattttcgtacaccttcaacaactgattacaacggcgtttatcaaggttattatattgattttgaagcaaaggaaactaaaaacaagacgtcctttcctttaaataatattcatgaccatcaagtcgaacatatgaaaaatgcatatcaacaaaaaggtattgtgtttttaatgattcgttttaaaacgctagatgaagtttatcttttaccctattcaaaattcgaagtattttggaagagatataaagataatattaaaaagtctataacagttgatgaaatacgaaaaaatggttaccatattccttatcagtatcaaccaagattagactatctaaaagcagttgataagttgatattagatgaaagtgaggaccgcgtatgacggaaaacaaaggatcttctcagcctaagaaaaatggtaataatggtgggaaatccaactcaaaaaagaatagaaatgtgaagagaacgattattaagattattggcttcatgattattgcatttttcgttgttcttttactaggtatcttattgtttgcttattatgcttggaaagcacctgcttttaccgaagctaaattacaagatccgattcctgcaaagatatatgacaagaacggagaacttgttaaaacattagataatggccaaagacatgagcatgtaaatttaaaagacgtgccgaaatcaatgaaagacgcagtacttgcaactgaagacaatcgtttctacgaacatggcgcacttgattataaacgtttattcggtgcaattggtaagaacttgactggtggatttggttctgaaggtgcctcaacattaacacaacaagttgttaaagatgcatttttatcacaacataaatctattggacgtaaagctcaagaagcatacttatcatatcgtttagaacaagagtatagtaaagatgatatcttccaagtatatctaaacaaaatttactattctgatggcgtaacaggtattaaagctgctgctaagtattactttaataaagatttaaaagatttaaacttagcggaagaagcttatttagccggtttacctcaggttccaaacaactataatatttatgatcatccaaaagctgctgaagatcgtaaaaacactgttttatacttaatgcattatcataaacgcattacagataaacagtgggaagatgctaagaaaatcgatttaaaagcgaacttagtaaatcgtactcctgaagaacgtcaaaacattgatacaaatcaagattctgagtataattcatacgttaactttgtgaaatctgaattaatgaataataaagcattcaaagatgaaaatttaggtaatgtattacaaagtggtattaaaatttatacaaatatggataaagatgttcaaaaaacattacaaaatgatgttgataatggaagcttctacaagaataaagaccaacaagttggtgcaacgattcttgatagtaaaactggtggtttagttgctatatctggtggacgtgatttcaaagacgtcgttaacagaaaccaagcaacagatcctcaccctactggttcatctttaaaacctttcttagcgtatggacctgccattgaaaatatgaaatgggcaacaaaccatgcgattcaagatgaatcttcatatcaagttgacggttctacatttagaaactatgatacgaagagtcacggtactgtatctatttatgatgctttacgacaaagtttcaatatcccagctttaaaagcttggcaatcagttaagcaaaatgctggtaatgatgcacctaagaaattcgctgccaaacttggcttaaactacgaaggcgatattggtccatctgaagtacttggtggttctgcttcagaattctcaccaacacaattagcatcagcatttgctgcaatcgctaacggtggtacttataacaacgcgcattcaattcaaaaagtagttactcgtgatggtgaaacaatcgaatacgatcatactagccataaagcgatgagtgattacactgcatacatgttagctgagatgctaaaaggtacatttaaaccatatggttctgcatatggccatggtgtatctggagtaaatatgggtgctaagacaggtactggtacttacggtgctgaaacttattcacaatataatttacctgataatgcagcgaaagacgtgtggattaacggctttacacctcaatacactatgtcagtgtggatgggcttcagtaaagttaaacaatatggtgaaaactcatttgtgggacatagccaacaagaatatccacagttcttatatgaaaatgtgatgtcaaaaatttcatctagagatggcgaagactttaaacgtcctagctcagtaagtggtagtatcccatcaatcaatgtttctggtagtcaagataacaacactacaaatcgtagtacacacggtggtagtgacacatcagcaaacagcagtggtactgcacaatcaaataacaatactagatctcaacaatctagaaacagcggtggattaacaggtatattcaactaatccactcaacataaaatcctcagttataccatatttatggtgtagctgaggatttttttaggttcttcatcttttatggtgggaaggtaaaacttcctgctttttttataagtattcatacgctattgctatattagtagaaaccgtaaaatcagtcattcacatacattttgaaacatctaaatagtttttcatattcacatctttagctatgtaaaattattgaatttgaataagtagttgttcccatttttaaaattatgattatattttctcatagtcatcttagacgctgttttaaattgatatgtttatcaattccctgtgtacgttaatcagtgaaatatcaagatgtttgcaacatattttcacaatcataaatataagaaatccacctacgattcgaaatagatatcttaaagcatacctcaagatatccattatgatgtagatggacagtttttatattaagacgttgtaatgacacgacacctaacataaatacaaatatgtgtgcatgaattagttttatatattttcaacattaggaaatgatcaatcttgtctatacctgcttattctttaaccttgtttgataactagcattcattttaatcaattcagttttaaaggtcttcatttgtcgatagcccataaaatgatatttacgttcaatcatataatcatatctttctttaaaattcattggcacaacaggatattgatttaaattatcaaaatcaatattgccagttatctcattaacctgcttaaaataatcaacaattttactatggtattcatccaagtagggctttgcttcactagaacctaatgtcttatttttggcaaatacatcaatctcttgttctaaattatcaaatacctcttttgtaatatttgtcatgttatcacgcttctttcaagctagctttataacgtttttgtccttctctacaatcttctaatagtggacaaatatcgcatttaggttttcgggctaaacagtggtatcttccaaagaaaatgagttgatgatggctcctattccatctatctctaggtatgacagaacataaacggtcttctacctgtctcacattatctttccaacgattaatacctaagcgtttagaaacacgttctacatgcgtatcaacagctaatgaaggttcatcaaatgctacactcatgactacattagctgttttacgtcctacacctgctaaactttctaattccttatgtgtttgtggtatttctccattaaattgatcaatcaaagattgacaaagtttcttaatattcttagctttgttacgatacaaaccgatagaacgaatatcattcataagttcttcatcactgactgccaaataatcttcaggcgttttgtattttttaaacagctcagttgttactctatttactagaacgtctgtacattgcgctgacaataatacagcaatagttaattcgaacggattatcatgttttaattcacattctgcatccggaaacatatttgctataacatcaatcatttctaatgcttttttcttacttaccatcaaggttctccccgtttaaccaatcaaatttaggtaccgttttaactgtgtgcgtcattttcggtttattgaatttttctcttatttttctagaatcgtcaattgttttgacattgtttttcttccaattaagtaaaatacgatctatatatttaaagctaagtttattcaaactattcgcctcgtctaatgccgcttgtataattgcagtatcgtgtttatcaacatcaatccattgatttaacgtttctatttcatatggagataacggccttgcaaatgtatcctctaaaactctaaataattgtttaaatttttctttactattttgctctttcgtttccatactttgttgcttcaatatatgacttaatttttcgaaaaaaggatctagattcatatattcggtaaatctaccttcttcatctttttgaacttgtaattctagcaattcacgttgtatcaaattttgaataaccattgtaatatcacgtggttgcatagttgagcccttctgaagtaattcaattgaaggctgtttatttgatgtttcggaagcataaatcaatttaagcaaaatgactaaatcttgctcatctaaacctaagtcactgtaatggtctaataattctcttcgtatcactacaggtcttgcttttaattgatatttatccatgttcgtgcccccttttaaatttaaccattacttaatagtataaatcattttctttaattttcgactaaaatgcttaatatatttaactagtagcaaacaaattttaaataacagtattttttaaaactagattttaacaatgaactttatggataatcagatgaactatttattttccaaatatagttactaaacaaaagtttgttcatgattaatataagccgttatcaatcttcattttccaagcataaatcgcccagctattaatataggctggacgattctttttattatcataatataaattttaagtaacgatcctaaaacttatggatataaacggtttaataatcttgggaatggcgcagtttcacgaacgtgttcaacaccagaaatccatgctactgtacgctctaaacctaaaccaaatccacagtgtggcacactaccataacgacgtaagtctaagtagtaactatatgcttcttcgtctaatccatgttctttaacgcgttgttctaacaattctaagtcatccacacgttcagatccaccaataatttcaccgtatccttcaggtgcaattaagtctgcacataatacagtttcttcattttcaggatttggttgcatatagaaaggcttaattttagttggataattagtaataaacaccggtaaatcataatgattagcaatggctgtttcatgtggcgcaccaaaatcttcgccccattcaatatcatcaaagccttctgcttttaagaattcaattgcatcatcatatgaaattctagggaatggtgtcgcaactttttcaagttttgatgtatcacgctctaaaattttcaactctagtttacaattttctaaaactgattttacaacatgtgttacatattgttcttgaatttctaaactttcagcatgatttgtgaaagccatttctccttcaatcatccagaactcgatcaagtgtctacgtgtttttgatttttcagctctgaaagttggaccaaatgaaaatacttttccgtgtgccattgctgcagtttctaagtataactgaccactttgagataaaaacgcatcttgatcaaagtatttagtatggaataattcacttgtaccttctggcgcacttgctgtcaaaattggtggatcaacctttgtaaatccatctttgttgaaaaattcatacgttgcacgaataacttcatttctaattttcattacagcatgttgttttttagaacgtaaccataaatgacggtgatccattaagaattctgtaccatgatttttaggtgtaatcggatagtcatgcgcttctgaaataacttcaattgatttcacttgcatttcgtatcctaagtcagaacgattatcttctgtaattgtgcctgtaacgtatagagatgattcttgagtaatttctttcgcaagtttgaatacctcttcatcaacttctgatttaactactacgccttgcataaagcctgttccatcacgtaattgtaaaaaggcgattttaccacttgaacgtttatttgttaaccaagcaccaattgtaacgtcttggtttaaatgatctttcgcttgtttaatcgttgttttcataaccattctcctatttattttttcgttatacaatactcattcattttaacaaaatccgctttcaagttctagaactagactaaaagataacgtgtaaatggtaatgatttacgcacagatttgaacattaatttatattaagacaatacaatcatcagtttcagacaaaatatataataaagcctcaatattattagtatgaaggtcgttttttgtgctaacattcaagtttaattataaaactcaaattttgacgaccaaacaaaaattcttgtaacagaacatagcacatgtcatgtcacaagaattttactttgtatttcactttttctttttttgaatttgtcttaataattttccaaactgttgaatgtcgccttttttctgacgataattttcaagtgtttgttcaaaaaagtttttataattactgtttatgagtcgatcatcaaatgaaactattatgccgcgatcattttcacttctaattaatcttccaagtccttgtctaaaacgtgtaactgcatcaggtaatacatattccttgaaagttgaagtgaattcagaatccataagccaatattttgcattatgcttgttcataaacggtaacttcgctatcatcacacatttaataccatttgcttgaaaatcaaaaccttcaaaaaatgttgacgtaccaagcagtatggccttatcaaaattattaaactgttgtactattttataattttggttctgctgttgtgttaatacaacataatcttcaaattctggcaattcatttagcatatcttgtaccatatgcatcattttataactcgtaaataagactaaacattttgatgacgttatagtcgtatattcaataatatagcttacaatcgatgctacatactcatctatatttttatattgataagatgctacatcactcggtataaatacacttgtattttttgcactttgtaacgacgtgttaacttcaaatgtattaaagtgaacatctttgttgaataactgtttaaaagcttcaaacgaatgattaaattttaaagtaccagatataaaaatgagtgatttaaatttttccaatacttgtttcgttaatacatcttttacagcgtaatctttcacatataaacgtattgttgatttttgagataaatttttaatcgaaatgaaactagtatgtccagcttttaaactttgttcgatatttttaaatttatcttttaaatacaacaactgtttccgtaatgatttaactgttttatgactaatgccattgaatatttctagcgttttatttaacttatcgataatcgcatgtaaatccttcaaaatgtcttttgtttcaaaagtaaatacattatggaagcgatgaatatcatcatcataaacatcagaatcattgataatcgtaaatatcgttgagaacaattgctcatttaactcatgaatctcattcatactagccttcaagccaaaaatatcaattggtgcaatatctaatttttccaaaattcgctgcttttccagttgatcaattgcctttaacaatttttcattttcgtttttaccaatcaaaccaagctgatatttaatatcagcataactcaactcatttgtcacttgatttaaggcatagtctggtaagcgatgtgcttcatccactatacaatcatcaaacaattgatatattgaattttcaacatcagaatgaattaaatgtgcatgatttgtaataccaatttgaatgttctgtgcatttcgcttaataaaattataataatgaacatcgtgacgtgccggtacatatgtttcaattttctggtcaaaatacatcttttgaccaccttttaaatttaattcctgtatatctccggacggcgtctctgtaatccaaatcagcaattgcattttcaagatattcacttcgtaattacttgtgtcatcttttaaaatttgactaataagccccaatgaaatgtaatcacttttacttttaatcaatagtgcattaattttaaaattcaacgcttcattcattgctggaatatctttttctaacaattgactttgcagtaatttagtattggtagaaatcatgacatgcttcccagtttcaatattatacatcaaggccgcaagtaaatatgctaatgatttaccactgcctagtgatgcttcaatcattgctttttcactatgcatgagctgatctaatatagtttccgctaaatataattgttgcggtcgatatgttaagccaagttgatctacagctttgctatataaagacttcaagctgccattataatttgttgtcggctttttaaaatcaacttgcttacgatagataatctgttcgaacttttcgtacgatttatccaatggctttgcatcatattgcctaaccatctcaaagaaaatatcatacaaatcgtatttcaactgtttacttaaataatataattgcttcaaagtatctaacggtaacttttcaaatttttcaaaagctaatatcatcaatttagcagtagtagcggcatcttcgtcagctcgatgggcatttgctaaggtaataccatgtgcctctgctaattcacttaattgatagcttttatctgtaggaaaagctattttaaagatttctagtgtatctataacttttttgggacgatattgaatattacaatctttaaatgcctttttaataaaattcaaatcaaaatctacattatgagctacaaaaatgcaatcttttatcttatcgtagatttcttgtgcaacttgattaaaatatggcgcttgttgtagcatattttcttcaatggatgttaacgcttgaatgaacggcggaatctctaaatttgttctaatcatagaatgatatgtatcaataatttggttattgcgcacaaacgttataccaatttgaatgatatcgtcaaaatctaattggttgcctgttgtttccaaatccacaacggcataggttgccatacccatagctatctctccttgctttagtgttaaaaatctatatctgcactaattaaacggtgtgattcacccgcttcatctctaacaattagatagccatcgtaatctaaatcaattgcttgtcctttaaactgtttatcattttctgtaaatagcaacgttctattccaaatattagaagctgcagtatattcttcacgaatttcagaaaaaggtaacgttaaaaattgattatatcttttttcaatttcttgaagtaatatctctaaaaattgatatctatctaatttatttttatcatgtaattgtatacttgttgctctatgtctaatactttcatcaaagttttctagttgttgcgtcaaattaatacctataccacatattattgcttctataccatcattattagcaaccatttcagttaagaaaccacacactttaccattatcaatatatatatcattcggccatttcactttgacttcatcttgactaaaatgttgaatcgcatctcttatccctaatgcaataaataaattaaatttagatatcattgagaatgcaacgttaggtcttaacacgacagacatccaaagtccttgcccttttgaagaactccaatgtctattaaatcgcccacgacctttcgtttgttcatcactcaagataaaaaatgaagattgatttccaacaagtgactttttcgcagcaagttgtgtagaatctattgaatcgtatacttcactaaaatcaaacaaagcagaactttttgtatattggtctattataccttgataccaaatatctgggagctgttgtaataaatgccctttatgatttactgaatctattttacatccctctaactttaattggtcaatcactttttttactgcagtgcgtgaaatattaagtgattccgcaatgctttgtccagatatataattcggtttatttttatagagtaattgaagtacatcttgactatattttgacatgattatccacccatttcaaaatttcagtttcttcgttgcttactttacctgttacaatcgctatctcaatttgtcttagcacatcttttaaccacggaccacttttggcatttaaatgtgccataagtacaccgccattaaccatcatgtcttttctattatgcataggtaaacgatgtaatgtttcatcaatcgtttgaaggttaacgattaatggttcatgtccttgaatatcatttgcctttaacacgtctgctgcaaccattacatttttaatgagatgcgtatcataatcataaacaaacatttttaattgttcttttgtaataatacttggtaatgcattcataatttgaatatattgattgatatcttttacttgtcggttacttagctttaaaggcttcaatgagtaattaatatcaaatttaactgatactatagcaatcaacaattctaaatcaattgcttcagttacattaatttgattcatatcaagatgttcgaaatacggcatataattaaatgctttcagcgattttaaatgattaaaactcttttcaacattaatacctcgcattaatttagttagttcaatcactatacgctcaattgataaaaatttaatatctgccatttgtatacgcatcgcttcgaatgtttccgttgcaatatcaaatgataattgtgactggaaccttaaacatcgaatcatacgtaaagcatcttcttggaatcgttcctcagctatacctacagttcttattattcgattattaatatcttgttgaccatcaaaataatcatacaatttgtatgctgtatccattgctatcgcattcatcgtgaaatctcgtcgttgcaaatcttcgtataaatcacgaacaaatgtaacaccacttggtctacggtgatcgacataatcttcttcagcccggaatgttgtcacttcataattttcatcattaaaaactacatttatcgtgccatgttctttacctacaggtatcgtatgactaaagatagattctatttcatccggcgttgcacttgttgtgatatctatatcatgaatatttcttcccatgacataatctcttacagagccacctacataatatgcttcaaaaccattgtcttgaatttgttctaatataggccttgcctgttcaaataatgatttatccatattattactcgcctttacttttgttatgctcatttagcattttttgataataatactcatattgatctgtaataagttctgatccaaaacgttcagcaatatctgctagcatgtttttctgaagtttgttgtataacaccttatcttcaagtaatcggatagcatagtcactcgctgaatcacaatcacccacatctacgacaaatccagtttcaccatgtttaataacctctttaattccaccggcatttgaaccaattggaacgacgcctgttttcatagcctcaagtaaagttagtccaaagctttctttttcacttaataataatactaagtcagataattggtaaaattcacttacgcaatcttgtttccctaaaaataaaacatcctcttctacgtttaactctttcgtcaattgacgcattggcactaattcaggaccatctccaagtaaaattaatttactaggtatcttttcacgtacttttgcaaatgtttctataatagtatctatgcgttttacttgtctaaaattcgatacatgtattaacactttttcatctggtgctataccaaattgtgattttaatgctgtgttatgtttagttggaaactcattttcacgtacaaaattataaatcggtataatttctttgttagtttcaataatttcatgtgtttcttgtgctaaagatttactcacacttgtcacaatatcacttttttcaatgccaaatttaattgcaccttggagtgaatgatcatagcccaaaacagtaatatcagtaccgtgtagcgttgtcataatttttatatctttacctgacatctcacgagctaaaatcccacaaattgcatgaggtacagcatagtgcatatgcaacaaatcaagatcatattctttaataacttcagcgattttagtacttaacgtaatatcatacggtggatactgaaatactgcatattgattcacttcaacttgatgaaaaatcatattcggtaatggttttcttattctaaacgggatatttgaagtgataaaatgtacttcgtgacctcgctctgctaatttaattcctaattctgtggcaataattccagaaccacccatggacgggtaacatgttatacctatcttcattcgcttgcccatcctttctttctatttctctctattattctcgatgcgtagataattgtttaaatttaagtttatagtaatgttgagtttataatttcatatatctaaaaacaggtgttgtatatataatcattcatctagttatacttactttaaaaataatataatttcatgcgatgcaattcattgatggatgtttttaatcttaatcaaatccaaataaagcatatatttttaaattcactttctttcgaatcgatttttatctcttgtattaaacttttccatagtttcattaaagctctctgtcatatctattcccattgaattcgctaaacataacaacacaaataaattatcacctaattctgctttaatcgtatttgcttcctctgaatctttcttctttttttcaccataggtatgatttatttcacgtgcaagttcgcccacttcttcagtcaatctagctaagttagctaatggtgaaaaatatcctgttttaaattgtccaatatattcatcaacttcacgttgcatttctaccattgatttcatttctacgttctccttatattgcatttctaatatagtatatatcaatttgaagtctcatgcatgtttagtgcaatctactgactctagctaaactagatgacaagttgtttattttagaagtttaataattcagtttatataaatgtaatgcattcctaactaaattaaatcaattgaaattgggattataactttatgatacgtaccactacaataaaataatatagtgaataatctaccattagaaaaataagcacaaaaaaactagcaaccacacaaaaatgtgattagctagttaataagtgtctaatttaagttaattgttaatctataagattaatcacttgaacgcgcaatcaaaataatacgtacaagctctgctacagcgactgcagttgctgcaacataagtcattgctgctgcagataatactttacgcgcatgcttgtattccttttcatttacaatgttcaatgccgtaatttgtttcatcgctcttgaactcgcatcaaactcaactggtaacgtaacaattgagaataataccgctaatgacattaaaccagcaccaatccataaagcagttgaaccaaatgcactacctatcgctgttaagataatacctaacatgatgatcatataacttaatgaactccctaggtttgcaacaggtactaatgctgctctgaatcttaagaaccaatatccttggtgatcttgaatggcatgaccaacttcgtgggctgcaattgcagttccagcaactgatggtctgtcatagtttgcaggagatagtgaaacaactttctttttaggatcgtaatgatctgttaagaatccttcacctttaacaacttcgacatcataaataccgtttgcatgtaaaatttctaatgcaacttcacgacccgttttaccactagttgatctaacttgtgaatatttctcatagttagatttaactttgtgttgtgcccataaaggaagcaccattaatattacgaaataaattatcatagtaaaaattgaagacaataaactcactctcctttataaatattttactgtcatttgccgtttttatcaaatcatttacactttaataatttgtttaattcaatataaagcaaaagtccaaaaacacttagacaacatgataatacaccaatttgccacacatgtgtagttataaaatcataatatggaaattgaaggtgaaaatagtcaatataatcattcaaaaatacccaaatcatcgctacactgattccaatcatagaacgtttaaacctaggatagaagtaaattgcctgaatagccattatactgtgggaaaacattaataccaaaccatttactgtaatatcaccttgttcaataataaataatatattcattataactgcccaaatcccatatttgaataatgttacaaatgccagtgcatcgataatactattttgtttttgaattaatatcaatgtgatagaaataactaagtataatattgcagttgggctatctggaacaaaaatcttaaaatgccacggcgtatgacttaattgttcaccataccatatataaccataaatcatccctaatatattacaaatgagtagcatcattaaccaagaacgttgataaagtgtatattgccaaaatgtattaatcgtcatctgctaagtcctcaaattgattatgtttatttactagcttgagtgtatttaaaatttgcgttagttgataaaaacgttgcttttcattcatctgtaaacttaaatcaatattatgtagcaagtaatctattaataacgcatgtttatgccgatctatagccatactatttaagtcatgaagataagtttgataactgggcgattccgttagttgagcaactattaaatcatctagcctttgctcacgctttgacacgtttgcgaagtgaatttgaatatcaaaagcacagttatgattagcgatataatcaaatatttcatttgtattcattaactttatattacgcttagtaaattgaattgcagaagcgtgacttcccacttctgcaatttctaatgtttcatgatgattaatttttgtatctacaaaatgaatgtttgccaatttcgcctcattcacttttatatagttaagcacccaaactgcaatacgcgacttaaatcgatattgaaaaagtaaatattcaataaaactttctttaatttgattgagtgtctctgacatcaaataccccattttaagattgcaatcttgataattcgtcatgccaattttcgttacttggttctagttccaacaattgatttaaaatagtaattgcttgttccttttgaccaatttcaattaaatagaaataataatcactcataaaatcaatatttgttttcatcgttggatatgctaattcaaagaaatgttgagcttctttatctcgctcttcttgaccataggcgaacgctaaatgccacatgaatgtaggatccaaatcttcttcatctacatatgttaataattcaatgattgcttcataatcttcttcattacgatataaatcgcttaaaatcaataaaggttcttggtaagcattatcaacctctaatgcttgttttaacaataatacaccttcattagcatcgccgtgttctatttccaaacatccagttgtatacattaactctttataaaattgacttagtcgtaatccttctttacccgtctcaatggcatctggataatttttttcattttcatataatgattgtaaatacaagtagccttgaatataatcaggatctttagaaagtaatgtagtcattattttaattgcttcttgagtgatgtcatttttatcgtaagaaatggcttttttgagataatcttctgaagtcatttcatcttcattaatttcatcgtataagcgaatcgcatcactatagttaccactttgtaaactacaatctgccatacgagagaataagtttacaccattaacttgatattcaccagtttctaaaacggtttcgtattcagaggtagcacgtaaatattgaccatcataatataacatttcagccaatgcaaaatggattattggatcatttggctctagttcaagtgcttcttgtaatttatcaatagcaacttccatcatattaatttgttgatataaatctgcttctaacatcaacttttcaggtgatggttcaacataacttaaatattctaacgcttcgtcagtttgattttcagacattaaaccttcaataaaataaatcagcaattcactttcgtctggatatttttgatataacacgcggaatacttccaaaccttgtggcattaatccaaaattgtaaagtgtctctcctagaataaataatgcgtcatcgttgtcagtagttattgcttcattaacacgagagtctaaattttctagtttttgtagattgatatcgtctattaatttatagatatcttccattttatattatccctcattttctaaaagctttagttttggtaaaaatcctggaaatgatacatttacagcatcaaattgtttgattttgacaggctcgcttgaaagtagagaagcaactgcaagcatcattcctattcgatgatcagttaaactatcaactgttgcatttgttttaaattctgacggatgaataatcaatccatcattagttggttgtaattcaaaccctaacaagtttaacatatcagccgttgtatcaattctatttgtttcttttacttttaattcctcggcatctttaattgtactcgtgccaactgcttgtgtacaaagtaatgctattacaggcagttcatcaattgcttttggcactaattctccttcgattgttattggttgaagcattggtgtgtattgaatacgaatagaagcagtaggttcagcaccagttgtttgattgaaaagttggatattaccgcccattttttcaacaatatcaataatacctgaacgtgttggattgattccaatattatgaatcgttacatcacttcctggtgtgataagtgctgcaacaataaagaacgctgcagatgaaatatcgccaggaacatgaaaatctgcaggtttaatatgttgaatggcatcaggggttgtagttattgataacccttctgcttcaattggaatattaaaatgtttgaacatcgtctcagtatgatttcgacttacatctaattctttaatgatggtcggttccttagaaaacaaacttgcaaataaaatggcactttttacttgtgcacttgcaacttccatttgataatttataccttttatgacagatggcttaataattaatggtgtataattatcttcaataccttcaatattcgcatccataagtttcaatggtctcaagacacgatccattggccttttaccaattgaaacatcgccagacaaaacactttcaatacctaaaccacttaacaaacctgccaataatcgtgttgtcgtaccagaattacctgtatacaatacttgatgtggtgtgttaaaagattgatatcctggggaagtcacaactaatttttcatcatcttctttgatttctacacctaacagtcggaaaatgtccatcgtacgacgacaatcttcgccaagtagtggcttatatatagtagatacaccttcagctagcgacgccaacatgattgcacggtgtgtcattgacttatcgcccggcacttctatttcgccctttaacggacctgaaatatcaatgatttgttcatttaccatttcattcacctacttaaaatatgtttttaattgttcacatgcatgttgtaatgttagttgatcaacatgttgtacaacgatatcaccaaattgtctaatcaagaccatttgtacaccttgcttatcattctttttatcacttagcatatattcgtataacgtttcaaaatccaagtcagttatcatgtctaaaggataaccgagttgtattaaatattgaatataatgattaatatcatgcttagaatcaaacaaagcattcgcaactataaattgatagataatgccaaccatcactgcatgaccatgaggtattttatgatagtattcaacagcatgcccaaatgtatgacctaaatttaaaaatttacgtacaccttgttctttttcatctgcaacaacaatatccagcttcgtttcaatacctttagcaatatatttatccataccatttaatgactgtaatatctctctatctttaaagtgctgttcgatatcttgcgtcgttgattcaccattcaataacgcatgcttataaacttctgcatagccacttaatatttgctcaaatggtaacgtctttaaaaaatctaaatcataaatcacagcagttggacgataaaatgcaccgataaggtttttaccttgttttgagttaatacccactttaccgccaacactagaatcatgcgccaaaatcgttgtaggaacttgtataaaatggacacctcttaatagtgttgctgctacaaatcctgcaaaatctcctgtcgcaccaccaccaacagctataatcgctgtattacgcgttacatgatgtgacaaaatatattctaatgtttcttgatattgctcaaatgttttcgtcttttcaccagctggaataatgactttatgcacattttcatatgataaaatatcatcaaatttatcagcaaaatattgatttacatgctcgtcaattaatataaaactttgatcaaactgatcaatatacgtgctaatatggtcaattgcaccatgttcaacaaatattggataattgtttgaaggataggttgtttgtaatttcatgatcacacctcaattgttctcgttgttaaaactcaacatttaattgtctgcggtcagcaatttgttgttgaagttgttcaatatggtttgattgaaactcttcaagtaatgctttcgctatttcaaatgcaacaacgtgttcacacactatacttgctgcaggtacagcacaactatcagaacgttcaattgttgccttaaagtcttctttagtatttatatcaactgaatttaatggtttatataacgtaggaataggtttcattacaccatttacaataattggcataccatttgacataccaccctctaaaccacctaaatgattagatccacgataataaccaatttcactattatatagaatttcatcttgaatctcactacctggcttttcagctgctttaaatccttcaccaaagcttacacctttaaaagcatttatgctgacaacaccttgtgcaatcttaccatctaacttacgatcataatgcacataactaccaacaccaacaggcatattttcaactacaacttgaacgacaccgccaattgaatctccttcatttttagcttcgtcaattttatctcgcattgcttgtgcgatactgtcatcaattacacgaacatcattacgatcaagatttgctttaaatgtttctgaatcataaaaatctttatctttaatgccacctatttcaacaacacgactgtatatatcgatatctaactgttgtaataacactttacataaggcaccgactgcaactcgagctgctgtttctctagcagatgatcgctctagcacatttcgtaaatcacgatgattatatttcatacctccaaccaaatctgcatgaccaggtcttggttttgtaatagtacgtttcatattttcacgttcttcttcacttattggagctgctcccataatttttctccaatgcgtaaagtcatcattggttacaaccatagtaattggactacctaatgtataaccatttctaacgcctgatactatttctactgtatctttctcaatttgcatgcgtcggccacgaccataacccccttgacgcttgaacatttctttattaatatcttcaactttaatttctaaatttgctggtataccttcgacaataactgttaattgaggtccatgtgattctcctgaagttagatatctcatacacactcgctcctttcatacttccgcaataacattataatatgttgttaatcttatcacattcattgtggattcataaatgtttgttttcaagcttaattaagaaaatggatgacatctcattttaaatgtcagaattatcttaatattaaacgaactaaaattaattataatatattcgtctgtagaaaagtatcatgaatttctaaacagttgcatcatataatcattaattaaaaatgattagccgttttaatataatcgtatcgcaactttagcaaataatatactgactacatttcttaatacaaaagaacgaactgttaattattaataaagttaatcagtccgtttaaaaaaattatgatattaaaatatacatatgttaagcgcttttgttatactttgacttcaaaaatataatcaattcttttactaatacataaaaaatataaatgagagtcagtataaaaataatttttgttataggattaagtggtttatctaaaaatatagcaccatatagtaattccattaattttaagaacattaaaatccccaaaataatcgaaataatattcttcattttaacaaccccttctctctgtttagtttcatttgataaagaatattcctctctttttaatacgtgttaccaaaaaactataaaatttttcaagtaatttactacaacataaaaaacgggccttgttatgtataatcataatgactaaccacataacaaaaccctttctacctttataaataaatcgtaaaggtttacagtttatattttattcatataaccatgcatcacgtggtgaagcatagctagtaatttcattttcattaaaccatagattaatttcacgttcagcagactctaatgaatctgaaccgtgaatgatatttctaccaacagttaaacctaaatcacctctaattgatcctggtgaagcttctgaaggattggtgctgccaataatatgtctagatacattaactgcatcttcaccttcaactaccattgcgaacactggtgctgatgtaataaatgaaattaaatcattataaaacggtttgccttggtgttcaccataatgtgtttcagcaagttccattggtacttgcattaatttaccaccgacaagttttagtccttttctttcaattcttgaaattacttcaccaattagatttctttgtactgcgtctggtttaatcattaaaaatgtacgttccactttatgtatccccctgtgtttaataggtttatgtatattactattatatattaacaggttggtaaagcgctttcaatacttttcataaatactatgtgtttcttgaccccatttttttcgtcaaacttaaaagtagtgatttcggatgtccatctggtaactcagaaatcaaattcaaagctttacttaaatacttcgaacttactgccttagcctcatcgatgctgtcagattttctaatgatttggatacattcttcaaattctttgcgttcactatcacgacgtaactgttcgattttcaatttgaagtctggatttttacgcatttctaataaaatcggtaacgtaatatgaccattaagcaaatcacttccgaccggcttacctaatttcttttcggtacttgtgaagtctaatacatcatcaatgatttggaagctcatacctatataatgaccaatcattttcaattttcgtacagtctctttatcagattgagaagtaattgcaccaacttcagttgatatttgaattaacagtgctgttttgcgattgatacgtcgtaaataattaataattgtctgttgactgttaaattggtcttgaaattggaaaagttcccctctacaaacatcaacgatagattcagatatcaattgatgtacacgattatctttaacggccattaagtgttcaagtcctaatgccaataaaaaattcccagttaaaatagcagttgtctgatcccatttctttgatatggttaacttgcctcgacgcttgtcgcttttatcaataacgtcatcatgaacaagtgttgccatatgaattaactctaatgcgattgcaacttgatacgtttgttcagacgtttgttcatctttgccaaattggctactcagaataacaaatgctgggcgtactcttttaccaccagaagacaataagtgtaatgatgcctgttctaatacagaatctttactttttattgccttttcaagtcgttgttccactttcttaatttcattgttcatgtttaactttgccacgttaatcacctttggtattatctttttctttatagccaaggtgcattgcagcaacgccccctgtaaaactacgtactcttacatttatgaaacctgcttcttcaaacatgcgcttcaactcttcttttccaggaaaattaaacgtagattgctgtaaccattcatattcttcttttgattttgcaaataattttccaaaaataggcataacaaatttaaagtatagtgcatacatttgtttaaagactggcaaagttggttggctcgtttcaagacataccaccataccacctggtttaagtactctattcatttcttttaacgcgactaaatagtctggcacatttcttaatccaaacccaattgttacataatcaaaagaattgtcttcaaacggcaattccattgcatcaccatgaacaagtttaacattttccattgaagcagttttttcttttcctacttctaacatattctcactaaagtcaataccagtaacttcacctgttggtcctacagctttgcttaatgcgattgtccaatcaccagtaccacaacaaacatctaatgctttcgtcccttttctaacacccatgtctttcatgacgcgttttctccatactttatgctgctcaaaactaataatattatttaatctatcatatttttttgaaatattttgaaaaacgcgatgtacttgctctttatttgctttattgtcagccatgcttaattacctctactttttaaataacttttttggatatcgtgtaagtaatgctttactttactttgattatatttcttgaagtatgatggatagtaatcagacatatcttcaaataaataattatatatttccgactcatcaatattgataccgaaatgagataacgtaatatatgggaaaagtgtttcaatttttactattgcttgagaaatttcataatcatttaaagcttgatgatgtaatgaagatttcaattcattaatttcaacaattgctttactaatttcattttgaaatgataaatcattgatttctgctagtagcgtataaaaatgtgcactaattaaatctccaatcaaaatggaatgtttagacaaatgattatatgtaatgtcatcaaggtgtctcattgatgtgtcaattgtgaggcatgccactttggcaacatctggaatatcatatgaatcaagtaacttacctaaccgatgattaatattaatggattcatattctgatacgccctttaatctttcttctatttgtctttccaatttgctaacagttgtttccatgtctacacctcacgatattatcactattcatattaacattatatgtaagaaattaaaatcttttgaagcattaagattacttatcatttttaaatttcaatttaaactaacagtaatttatgtagcttttgtaattctcataataacctttacttcatttacattattcatctttttaaataacgtaaaatactatagtagacatggttaccttttaagtaaattcaacgctaacaattaatctcaatattcatatgtatattttgtagttgctatttttatcaaaactattatgtcatgtaatattttgaacgcttaaacaatgaatgttccaaagattaaaaacttagaagaacattacaatttatgtacaggttgtaagtattaaaagcaaaataaaaagcccttattcagggctttttaagtaaaattattttacagcatcttttaatgctttaccagctttgaatgctggaactttacttgctgggatatcaatttctttaccagtttgagggttacgacctttacgtgcagcacgttcacgtacctcaaagttaccgaaaccaattaattgtactttttcacctttagcaagtgagttttggattgattcgaatacagcatctactgctgaaccagcttcttttttagttaaatcagcttgctctgcaactgcattgattaaatctgttttgttcattagacattcacctcctgaggtttgataatgatatgtttatatcattatggtaaaactttaacacaagcattacataaatcgcaatcatttatgtggcaaaaacgttgaatttaagccatttctattcattttacgtaattattagccgtatatgtgtaataatacacattttattcagattttttatcgcgctccattaaatcttttacgcattcttttactgagatattttcaaataatactctatataatgcatttgtaattggcatatccacatttttttctttagctaaatgataaactgatttagttgtataaataccttcaacaaccatattcatttcagataatgcttgatccattgattcaccttgtccaagtttatatcctaatgtgaaattccgagaatgtgttgatgtgcaagtaacgattaagtcaccgataccacctaaacctagaaatgtcataggatcggcacctaacttttcacctaatctactaatttccgctaagccacgagtcattaatgcagcttttgcattatcaccgtagccaattccagctacgataccacttgctactgcgatgatatttttcaatgcaccaccaagttcaacaccaatcaagtcatcattcgtgtacacacgcaaataatcattcataaataaatcttgcgttaatttacttacacttttatcttttgatgaagcagcaactgtagttggttgcttgactacaacttcttccgcatgacttggccctgacaacacgccaatacctgcattatattcaggtgaaatagaatcttcaatcatttctgacacacgtttaaacgtcccattttcaatacctttagcaacatgtataaaagtctttttagaggtcagcttatcattaatttgagaagcaacttctcgcattgctttagtaggtaaagccattaagtaaatatctgcaaattgaattgctttggtcatatctgaagtagcgatgatgttaacatctaatttcgcgtattttaaatactttttatttgtatgacatgtatttaattcatcaacagcatcttgatttttaccccacatcaaaacatcatgtccattttctgcaagaacattggcaagggctgtcccaaaacttcccataccaaaaacggtaattttagtcattgttatcccccaatcgttaatttctctttcgagctataatatgaattggtgtaccttcaaaaccaaaagcggcacggatttgattctctaaatagcgtttataagaaaaatgcattaattctacatcattaacaaatacaacaaatgtcggtggttctatagcaacttgtgttgcataaaagacattcaaacgtctacctttgtctgttggtgtagggttcatggaaattgcatcagtaacaacttcatttaaagttgaactttgaacacgttttttatggttttcacttgcttcattgatgtaagggaataatgtacgtaatcttgtgcgttctttagcagacacaaaagcaatttgtgcataatctaaaaattggaattctttacgtacttcatcttcaaatttcttcatcgttttactatctttttccacagtatcccatttatttacgacaatcacgactgctttaccttgttcatgtgcatatcctgcaacacgtttatcttgttcaatgatgccttgttctgcatctatgaccactaaaacaacatttgaacgttcaatcgcttttaaagctcttaatactgaatatttctcagttgattcatatacttttccttttttacgcataccagcagtatcgattaaaacataatcttgtccatcataactatactctgtatcaatagcgtctctcgttgtccctgcaacattagaaacgataacgcgatcttcacctaaaatagcatttactaaacttgatttacctacgtttggtcgtccaataatggatagtcgaattgtatcttcatcataaggatcttcttcctcttcaccaaaatgagaaacaactgcatctaacaagtcaccaagacctaaaccatgtgaccctgatatcggatacggttcaccaaatcctaatgaatagaaatcatacacgtctgtacgcatttccatattatctactttgttaaccgctaatacgaccggttttttagatttgtataaaatttgagcgaccatttcatcgctttgtgtcaatccttcacgcacgttaaccataaaaataataacatccgcttcatctatggcgatttctgcctgcgctctaatttgtgtttggaatggtgcatcaccaatttcaataccacctgtatcaataatattgaaatcatgtgttaaccattcacctgaagaataaatacgatctcgtgttacacctggcgtgtcttccacaatcgaaacacgttctccaactattctattaaaaattgtagatttacctacattaggcctacctacaatagctactataggtttagtcataagctaacttcctctctttcttatatctttttaataatatcacatgagactgtgtattcaaaatgagtttattactgtaatgataaaaatcagcacttaaaactttatctttttaaacacttagttaaatttgtccacgttatcattccgagtatattttgttacataaaaatactccacatgcaatcataaacatgtggagttgactattaaatattaaattatagtttaagatttttaagtttatcaccaatcatatcgccaattgttggattatcttcttcttcgttttctaagtacgccttagtcgtagaaggatcactttcaacaacatcttcgtttggtaatgttgctttaatagatagtgatactctttcattctcttcatcaatacctaatattttaacatttacttgttgaccaggttctaacacttcacctggcgtaccaatgtgtttgtgtgcaatttcagaaatatgtacaagtccttgtacacctggtgcaatttcaacaaatgcaccaaagtttgccaatcttactacgacaccttcaatgacatcattttcgtggaattgacctttaatattttcgaaaggtgttggtaacgtatctttgattgataatgaaatacgttctgtatctctatcaatagatttaattttaactttaacatcttgaccaattgaaactacttcttctggtgtttgaacatgttcgtgagaaagttcagatacatgcactaaaccatcaacaccgccaatgtctataaatgcaccaaattgagttaaacgcgctactttaccatcaataacatcgccttcatttaaagattgtaataattgatcttttttagcatcgttttcttcttgttcaactgctttacggcttaaaatgactctattattttcaggatccaattcttcaactttaatacgaattgtttgtccatcaaacacagagaaatcctcaatgaagtctgttgaaattagtgaagccggaacaaaacctctttgtcctacatcaacaaccaaaccacctttaactacttctgttactttcgcttcgatgatttcattattatctaatttttcttgtaaataactataagacttctcagtttcaagttgtcttctagataagatgtaagctccagtttcattttcttcatcaaactcaactttagtgacatatgcttcaacttcgtcgccctcttttacaacttcacttgggctatcaatatgatgcgtagatagttgactaataggaataatcccattaaatttaccaccgttgatatgaacaacaacttgcttgtcttcaacttgttgtacctcgccagtgactttgtcaccttctttaatatcgttaatcattgattcattgaattcttcagtcatcttgtttgcctccttatacactacatatttataacatcttataaactgacagaattgtcaagaaattctacctttattacatttagtaaattagttgtatccataaatatgtcacttaatctcattctgtaaattagttggacatatatttattacaaccatatattcaaacaagtaataaagtccgctatgtttatacatattttttgtataaaaattagcatagcttactattttgttttataagtctgtcatttcattgttctctacaagatatattatagtaaaattttatacttttataaaacaaaaagccacgcaaataagcaacttttacatttgaatagtaagaagaccgtatatagtgcatctttctcgaattattacataggacattttttgtgactaaatcagcttcttttgcaatatttagatttgtaacactcattttcttaccatttgtaaaatgctttatgaatgtaatgaattatttttggaattctaataattcacctttattatttctttttactttttgaaaaacttacacaattcactgacgcattaacttttaccaaaaataaaaaggcaactttcattcatcattgaataaaaatcaccttttaatttgagtaaatcattatcagcacattcattttgtatatgcgttaagcgttgcacattacaaatagatagttatgacttattagattatttaatttgactcaccatcgctaaaatttcgtcagtaacttcttcaatcgacttgcctgtcgtatctaatgtcactgcatcatctgcttttcttaatggtgatatttcacggttcatgtcatattgatcacgagcttcaatatcacgttttaaatcttcaaaatttgattcgatacctcttaatagattatctttatatcttctttctgctcgctcttcaactgatgcaatcatatatacttttaaatctgcatctggtagcactacagttccgatatcgcgaccatccattacgatacctttttctgcagctaactctttttgttttttaacggcgaatgaacgtactggctctttagatgcaacgtatgaaacatgttgcgtcacatcattatttcttaaaaagtctgttacatcttcgttatctaaaatgacacattgacctttatctgctttataagttaaatctaatgttgtttggtcaactagttttgcaaagtcctcagttttgtttaattttaaatatttgtatgttaatgcacgatacattgctcctgtatcaacataaatcattgatagttcgctggctacacgttttgcaattgtactttttccggcagcagctggaccatctaatgcaatattaatggctttcatgcgtcatttcccttccttgtcgttttatgaataatattttatcataattaggtaaatgaaatataggaggaaatatatgaaacatctacttgttattcatactggtggcaccattagtatgtcacaagaccaatctaataaagtagtaacaaatgatatcaaccctatttcaatgcatcaagatgtcataaatcaatatgcacaaatagatgaattaaatccttttaatgtaccatcacctcatatgacaatccaacatgttaaacaattaaaggatattattttagaagcaatatcaaataaatattatgatggtttcgttatcacgcatggtaccgatacgttagaagaaactgcctttttacttgatttaatattaggtatcgagcaacctgttgttattactggcgcaatgcgctcgtctaatgaaattggttctgacggattatataattatatttccgctattcgcgttgcctctgatgaaaaggcccgtcataaaggcgtgatggttgtatttaatgatgaaatacatacggcccgtaatgttaccaaaacacatacgtctaatacaaacacatttcaaagtccaaatcatggtccgctaggtgtattgacaaaggatcgtgtgcaattccatcatatgccatatcgccaacaagcattggaaactgtcaatgagaaactaaatgtaccattagtaaaagcatatatgggtatgccaggtgacatttttagtttttatagtcgtgaaggtatcgatggtatggttattgaagcgttaggacaaggcaacatacctccaagcgcattagaaggcattcaacaattagtatctttaaatatacctattgtgctagtttcacgttcctttaatggtattgtgagtccaacttacgcatacgatggtggtggttaccaactcgcacaacaaggttttattttttctaacggtttgaatggtccaaaagcaagattaaaattattagtcgcgttaagcaataatttagataaagctgaaatcaaatcatattttgaattataatgaatacgtaacataaaaaggtctatgtacaataattagtcatcaacctcatttgacatatcatgaatgtcagtcgttgtaaaactaagttatttagtacatagacctttatttttatgattctaacggcgtttgtttcttagctagcatgttttgagcaataatgccaccgtggaatttaccattttcaataaaaatggtattcgcatcgttccctgcagcaatcacacctgcaatgtagcaattttcgatatttgtttcgtatgtttctttattatacataggcgctgttccaaattcatttgtattaatttgaatacctacagattttaaaaattcataatcgggatgataaccaatcatcgcaaatacataatcattgtgtattgttttactttcaccatttacttcataagtcacagtatcttcagttatttgggtaacattagcattaaattccatgtcaattttttcatgatttactaatgctgtgaaatttggaagtatccacggtttaattgaaggcgaataatctccaccacgatatagaaccgtcacgttagcaccagctttttccaactccaaagcagcatcgatagccgaattcttaccaccaataataacaacatcttgatcaaaatacggatgtgcctctttaaaataatggaacactttaggtaaatccgcaccttcaacttctaatgtattatgctgaccataatagcctgtcgcgattgttaaaaatcgacattcataaacatctttcgtcgtagtaatagtaaatttattattcatttttttaacagttaatacttcttcaaatgcagttacttttaattgatgatgttttacaacttctcggtaataaactagcgcttgattacgtcttggtttactttcttcaacgataaacggtacatccccaatacttaatttatcacttgatgagaaaaatgtttggtgagtaggataattatatattgattcaacgacattacccttttcaatgattaaggtatcaataccttttcttttttgttcaatagccgcacttaatccgcatggccctccaccaattatgatactttcaactttttgcattgtttcggcctcctttaatcccaaactattataacagttcagtgattgatgcgctaagtctgtgcttgaagatttatgatatattttcgacaatttgtttaatgtgcatagagaattgttagctacggagttgaataacactacaatttaatatgttgatttattttttattcttcctcgttaaaattgttgattgtggtgttttatctttttgatgactatgtaaaaaatttaattgatatgccaatattcgagacaagaccttgttaaataacaaactttgaaaaatgaaaaaaccgctacatacttataagcgcaatttaagttctccaaaatatttagagatacttataatatgcacgtttgtatatagcagttcagttacaatttatatagttatattatggaataacgatttgttgaccgtttctaatattgttaccacttaaaccattggcacgtctaattttttcaacattttccggtgaacctgaaccgtagtattgaattgcgatacggtataagttttcttgaccattcactgtatgtctttggccaccaccttgacgttgttgttgctgttgttgattttgattagcttgttgttgattttgattattttgtgcttgattgttcgcttgattagcgttgttttgatcattatcagattcatctttagtcgctttgtcttgatcctcttttgatttatcactgtctgtagattttgatttatctttagaagcgtctttagatgtgtctttgtctttactttcatcagcattatttttatttgtattcgcgattttattttcttttgtaccattattatgattgtttaatgccatgcctccaaatatcgctaatgcaccgataattagtacagctgcaattaatggtaacaatactttggccatgccaccttttttacgttctttatctctgtcatgattgtcatgttcatcatggttttggcttgcattattagaggcatgtggttttgaagcggcagaagcacttttacttgctgcgcctccagccaaacctgctgttccagcaccgatcgctgcaccttttttgccattatgatgatctttagacttatcttgagacgctttatcctcagtcgagttattcgacttgtcagaattacttttgttttgagcgtcatttgaatgtttcttagctttagaaacacccattgcaccagctgcacctgcaacacccgctgttccagcaccaattgctgcgccttttttaccactatgatgatctttagattcatctttgtcttgcttaacagttacatcatcatgtttatcttttgatgtatttgcttggttagcacctgttgcaaaatatggtttaggttgctgagattgttcagcttcactcttatcagaaactgttgaatgctcagtgttattttctgcttctttaatagtctcgtgtttatcattgtcttcgattggttctggatgtgatttatccattgcaaaagcattcttattataatattcctcttcatgttgaggtgtactgtcttgatggctaggttcttgactttcagtactgtgtgatgattcgacttgacgatcatctattgtgccagcctcattttgaacattgtcttcagatgtttgtgattcattgtgaacttgtttattatgattcgttgctaaatcacggcgtctttttcttctttgggcatttcttggcggaaactgttgctccgtattctctattgtatcctgatgttctaattctgattggtctttttcaacatcttccgtatggtcttgatgtgaatttgtgtctatcgattgacgatttttttcaaagtcatctttaaaattattagacatagccatcttcctttctattctattacaatgattttacataaaatatacccacatgacatatgtttatgtatatttttcaaaattatttcaatcatttttcaattgtgtatacactaattatagcttgtcaattttcttttagtaaagtaatactatctgagaaataaattttgcaacttttcatcaaatccaatacttctaattaccttcttcttatttaaaattgcgatatcagttatattagaatcattgtcacaacatcgatcttgtgccggtggatattcaccgaaaaattctaataaatacttccgtctacattgatccaatttgcaatagccaatcatgcgaaagaatcctaattgctttcgtttaaatgattgcttaaatatctgtttcaaggcgccgatactatagaatgaatgcaacgttgtcaaaacgtcttgtttatcgggagctaaaaattctcctatttcgaaattttgtacatcttcttctgttatcatatctgcaaataataacgtttctaaaatatatttatcgtccggttggaataaactaattgcctgacttagttcaccatcgcgacccgcacggccaatttcttgaatgtagttagaaggacttgttgaaagatgaaagtgaatgattgtgcgaatatcttttttattaattcccataccaaaagcactcgttgcgactataatcggaatatcattatttaaaaattgttgttgaactgtgtgtcgctcttgataattcatatcaccatgataaatacctgtaagaaaacctgaatcataaataagttgcgctaaattcagacacatctttttcgatgagacataaataatcgttggtcccgactgttgtagaaacggcagcaaccattcaattttatcttcatcatcatgaaaattaagatgcttaaagcttatgtttgggcgattcattgtagttttaataacattgaattgaatcgctaacatttccgtcaaatcatcttgtaaatgcggtggtgcagttgctgtcaatgctaagacaaccgcttctttaaaatgctttgttacttttcctattagagcataatgtggtctgaaatcatatccccattcagataggcaatgtgcttcatctagaacaatcatgccaaagtctatcatagatattaatttaaaatttgacggttgcaggagaaattctggacttagaaagatgaagcggctatgtcgtaaacatttaatattatgctttttctcaatttcatccataccagagtgaatagatgttacatgtttttctccatttattttcaactgcataacttggtcatccattaaagatattaacggtgagataattaatgtcggcttacctgataaatacgtaggtatttgataacacaaactctttccacttccagttggaagaatacctagagtgtgctgttgagacattatactttctataatttcctgttgtcccggtttaaaactctcgaagccaaatttgtttcgtaaaatatcatgcaacattcagatcacctctttcaaatccaacgattaatacttttaattgaaaatatgataacgtgtcaaattgttctttgtaaaattttaatcgttcgccacgatgttgttgataaaaattcaaaaattgcagttgattttcttgttcaacataatcatcgtaattagacatgtaacctttgattaagatttcaagtacatgatcttcgatagtattgattttaacttgttgttgagccgctatatcttccatcgtgaattgttcaagcaatcttgtataagtaatataagtttggtttaataatgtaggtttcattattatttttgataaaatagtatattctccactttctaattcaaacatcattatcactaaattattcatttcgtattcaaacaattgctgttgagatagtttttctattaaactaacttgttgtctcgtatacattggttcatcatagccttgcaaataataatgtaagtaacatggcccttttaaagttattgctttaaacaagttatgtagttcattttcaaaatcaatttgtagcttgttttctttaatgtagttatagacaatctttacagtttcttgtatcttattattttgagagattggtacaaaatgaaaaacatgttgtttggtattagacatggtttgcactaatagttgaattgcttgaaatgtttgccccatactttcaaatgtatatctaggatgcaacatgatttccatttcagcattaaattcagttatattttctaaaaatagctcaaaagacggatattttaatagtggtaaactgtgatataatgacaactgttgttgactacaagcgtcaaaaaaggtttggtgagatttcttaccaacaaagatattgtaaatacttttatttgttttatagttaaatgtttgttgtaatgctgtttttataatgtgttgcaaatttaaccctcactctgtaaaacggataatttgaaaataaaaatgatgctgtctaaaattttagtcacattactattttagcatttttatcaaaggaggcgaagacattggcaaaatatacaatcgttgatatggatacttgtattgcatgtggtgcatgcggtgcagcagcaccagatatatatgattacgacgacgaaggtattgctttcgtaatccttgacgataaccaaggtactgcagaagtacctgaggaattatatgaagatatggaagatgcaattgatggatgccctacagattctattaaaattgcagacgaatcatttgatggggacgctttaaaatttgaataattgattttttagacaaatgttctatagaaaaagcaggcaagctatcgtttattgatagtcacctgctttttattattatgtgtatattattttgctttaatttgattaaattcttttcaagaaattcgcaagccttctatatagtaaaataaatacaatagaaatgacgatacctttaataatattgaatggtataattcctgaaacaatgattactttaagattatttgcgatatcagctaagttaaatatcataccgtacaaaggtaatagaacgaaatagttcaagatactcaacacgatagtcataacgattgttgcaatgattaatccagtaatcaaagattttgttgaacgtttatttttatagatggcgtaagcagttaataagaaacttgcgcctgctaaaaagttagcaaatggtccaactggatcgcccatactaaataagtagttcaataaatttttaaccagtgcaactacgataccggcaactggtccaaacgtaaatgtagctagtagtgacggtacatcactaaaatctaaagttaagtatggtggcaaaaatggtataggaaacttgataaaagttaacacaaacgcaatcgcgctcaacatacttattgtgataagacgtttattttgttgcatattcaattttctccttccattcatctcgtaagaataggaggattattgcacaacaaaaaacctccatcttctcccatccagactatactgtcggctctagaatctcactagatcagccactaatatgatacatactagcaggtcgcaggcttaatttactgccggttgggaattacacccgaccccgaagatgaattttacattattaaatttaattcccattaattttatactatatatcacaaaacctcaataactatgcttaaaatgaaaattaattaagttggtgatgtataatgaatttgcgatttgcgagcattggttggaatgttgtttgtttgattaatttttgagatggcttttttgaacctatctttttattgtttttagtttaatcattcgtgttagcttattcatgattaaatacacctacttctattacatccttcttactataattaggtcttgttgtatttatatatttattagaaatttgaagagaaacattcaaatcatgaggaatattctttttcttttttagcacttcagaaaaatcaatcatctcgtctattgtattatctttagtaaaattatctttagtactaaataaagttgtaacaacatatggacgtgatttatctttaagttgtttttttgagtttctcataccgtccctaaaagacttatcatcctctttgattaagggttgaaaatactttttatattcatctaaagtatatggaattgcagtcaaataataatactcatttctaaaaccactattctgcgttttcataattgcattttcagtataaccagtatatttatatttacttttatattcttttaaaacttctgttaaattatccaactcttccttatgtgctcgatattcaaagccactcaacactgtaccaactaaagtactcatatcatcgcctttatcctcacttcttaatgagctatcactgtcaataattgatttgtcaaatggaatactcgcattaaatacgatatcgtggtcatcacaatgcacgtatacttctacgccgtcgccactacctacaacattcgtagctttaacttttagaccgaagttatccataaaaaattgttcgccacgtttagcaattttatctttatgcttcttcgcaaattcaatcgcatctttttctgcaggtggttggaagccttgacctacatattttgaagcttccatttcttctggtactgattttgtttctttattagattcgttattggtagttgaacatcctgatagtattatcgttgctattaagattagtttaattcttttaaacatagctcatctcccatttatgtgtttgtttagaatattaaaagcaattttttaaaattttattcacctttactgtgcaccccatattctattggacgattatcatcataaaaggcttttttagtattaatagtaggcttacctatttgaattgtaattgtagatttatctggtttattttttaaattatataatttatcacttagttcaattacatcatcttctgtattgtcattagtaaaatttttctttgtactaaacagtgtcgctactgcatctgtatcagcggcataattcacttcttttcttgctcgttccattccttctttgaattccttatcatttttttgaatcaaaggttcataatactttcgatattcttttaaacttctagaagagtatgtaatataaaaatattcatttttatatccaacgttttgtgtcttattaattgcttctttagtaaaacctgtatattgatatttcttttcattttctttgaaaaatttatataagttatcatacttttctttttgcgctcgatattcaaagccactcagcactgtacccaccatcatactcatatcatcaccgttgtcattactacgcattgatcctttttgatggatggcatctttgtacaagggcaaacttgcattaaatacaatgccatgatcatcgcaatgcacataaacttctataccatcatctttacctacaacattggtagcctttaccttcagtccaaagttgtctttaaagaattgttcacctactttttcaaattctttacgatgcttcttcgcaaattcaatcgcatctttttctgcaggtggttggaagccttgtccaacatattttgaagcttccatttcttctggtactgattttgtttcattgttggattcgttattggtagttgaacatcctgatagcagtaatgttgctattaagattagtttagttcttttaaacatagctcatcacccatttatgtgtttgtttagaatatagagaaattagctgatttcaagtcattcgacctcaatccttatagactcattatcactgtaattaactcgattagtactaatagtagattttgctagttgtaaaaatattttcgtattttcaaaattaaggtgtaactttttcgtactttcagacaaatctataacatcatctaattttttgtcctttgaaaagttactacttctcgaaaacaatgttgtatgtacttctattgcagctttatagcctactcctttccttgcttgtttcataccttttttaaaattcagattatttttctttattaggggttcgtaatatttcctatattcttggagcgtcggtatattagcaactatataaaaatattcattttcatatccactattttgtgttttgttaattgcctctttagtaaatcctgtatattggtatttcttttcattttctttgaaaaatttatataaattatcatacttttctttttgcgctcgatattcaaagccactcaacactgtaccaactaaagtactcatatcatcgcctttatcctcacttcttaatgagctatcactgtcaataattgatttgtcaaatggaatacttgcattaaatacgatgtcgtggtcatcacaatgcacgaatacttctacaccgtcgccactacctacaacatttgtagctttaacttttagtccaaagttatccataaaaaattgttcgccacgtttagcaattttatctttatgctttttcgcaaattcaaccgcatctttttctgcaggtggttggaagccttgacctacatattttgaagcttccatttcttctggcacagattttgtttcattgttggattcgttattggtagttgaacatcctgatagtagaatcgttgctattaagattagtttagttcttttaaacatagctcatcacccatttatgtgtttgtaaaacttttatgtttgaaaaaactacttattctcaatgaaaacaagtagcatttaataaattaattagtatacagctagtttttctaattgttctttaacttgaattaagtttgaccgtattagagaggcagattgatccatcgtttgaattgcttgtccttcattttcgttcaagccattacaaacaacttcaaactgttgtgccatttgatcaagacgcgcatgagcttgtgtgtttaaaataaacatatcgtcataatgtgatggttcaaatatcatttgtacaatcaaaggcttcatgttcttaacaatatcatctaaatggttatctaaaattggtgacactgcttttaaatcattaagaaaaggctcccatttgcctaaagtattatctaattcttctaatttagttttaatataattacaagttacattaggaatcagggacaaaaattctttcttttttacatttaacatttcaattgcatgtcttaaattcttacgtattttgggaattgtattaatcaaatattttattacatcgacaattttcgatgcatattcatcatatataccttgaacatagtctgctatttttttaataccatcatcgatatggtcttttaatattttcatttttcttcctaaataattagaaggtaaagctagaccctgcaccatattttcaccgctataattaatttgataatttccatctaaaattgttgcatcttgttgcttcataatacttctaatatctgcaatttgcctaccataaatatcattttgattttttatttgctctatattctgtttcactactttcaaatgtttcatcatttcttcagatactccatctctgaagtcgtgatctatatttttgaaaatttctaaaatttcattatctatactatcatacactttttctataaaagattttatacctttaaacaactcattaattctttcttttaatgcatccaatgcaaaatcaggtaataagtgtttaacagcactaatactttctattgtttcatctgcaacttcttcaagtgcgtttattttactaattaaagttctttccatttcttctaattgaaataagttaatcttatccttaaatccttctgataattgtttctttctatctgcaaaatttttattttcattttctgagatgttaaaactttcatttaaaaagattacgcattctgctaacataccacttgtttcaccagtaatcagtttactcaacgcatcaagattttctaaattaagtttaattaaagttccttttccggaacgtgcaatcgaatctcctgtccaaacatttattggaattcgcccatccatatctaatgttatgttaatagtcttttttactttttttccatttttaatttctgtatcttttaccgacttaattttgattagtggtacagtatcgtatgtgttatcttttctatttaacttccttttataacctacatggctgtctattaaagcatctaacctgggcacactatcactaatgttaacgcgttttcctggcatatctttgatgaatggatcttgtaaccatgttaataaatcgttggtactattaaaactaatcatattatcaaagcgtggtctagcaaatttctgccaagcagcataaggaatcattgctgagtcagtagcaacaactttttcattcggatgtttcgctccttgatattttgctcctgcaccaccttccgaattaccaccatccgccacaattgttttgtttttgtaattataaggtttagttttgtattttcttctaaattcattttcatcaagaacagaagcatctttaattttttgtcgataactatttgcgaattcttctacttgctttaaataatctgtgctttcattatcattattcattaatttagcattttggagccaatcatctccaaaacccgatgattttaatggattatttgggttaattgcctcattagatgttccttgataaattattgtctgttgaccagttggattcccctgatcattaagtaactcgtatgttttaatatcagcagcaccattcatattatcattactattatcattataattatctatttgtttgaaccgttttccatttactttaaaatcttttttttcatttatatcttgataaacccaataactgctcaattctgctatgtccctatcatttattttattcactttatattcacttacccttcaattggatttatatcgtcataaaatggttttttagtatttatactagattttcctaattgaatagtaacttgagatttttgaggcatattgggtttttcttttaatttattactcaattcaatcacatcatctactgtattgtctttagtaaagtttttcttagttgaaaaaagtgtagaaactgcatcagtattggcagtataatctaactcttttctagcttgttgcataccttctttaaattctttatcatttttatgaatcaacggttcgtaatatttacgatattcttttaagtttcttgataaatatgtgatataaaagtattcattttgatatccaacgttttgtgtcttgttaattgcctcttttgtaaagcctgtatattgatatttcttttcattttctttgaagaatttatataagttatcatacttttctttttgcgctcgatattcaaagccactcagcactgtacccaccatcatactcatatcatcaccattgtcattactgcgcattgatcctttttgatggatggcatctttgtacaaaggtagacttgcattaaatacaatgccatgatcttcacaatgcacataaacttctacaccatcatctttacctacaacatttgtagctttaacttttagtccaaagttatctttaaagaattgttcacctactttttcaaattctttacgatgcttcttcgcaaattcaatcgcatctttttctgcaggcggttggaagccttggcctacatattttgaagcttccatttcttctggtacagattttgtttctgtgtttgtgtctttatttgattcattttccatcgcggaacatccccctaaaattaatgtcgtggttaaaactgatccaatgaattttttcatatgacacctcgaataatttaattattgcaatatatctatattttaccctatttttataatcaaataaataactttatcaaactttatatttttgtataaattagtaatatatttaatagttgttattcacaaaaatcctaaatcgtaatccacatacaaaattccccacatcaatcaaaaaacgcatgctataaattagagtctctaatcaataacatgcgttcttaaataactatattcagttttattctggttttggtagtttaataataaatgttgtgccttttcctaattcgcttttaacatctatggaaccaccatgctcttcgataatcattttacaaatgaacaaacctaaaccggtaccttgtttacctcgcgttctcgctgcatcaactttataaaaacgatcaaatacttgttgtaaatgttctggtgcaatgcctgtgcctgtatctttaatgtataaaatatcttcgctttcattttcatcacaagtaattgcaatttcatctccaggtttcgtataacgtgatgcattatcaatcaagttcgttagtacttggtccatgcgatccatatcataactccaaacacgcttcttacaataattaaaagtcatatttagacctaaatcatcagcttgttggcgatacttaattttcatcttatctagtaacgctgcaataggctgaacttctttatttacggataacccttcagcatccatgcgtgcgacatttaacaattcattaactaaacgatttaaacgtttcgattcatcaaggacaatggcaagcgattcttttatttcatccggttctgtaacaataccatctacaattgattcagtataaccttgaagtaatgatatcggtgtacgtaattcatgtgatacattagcaatgaaatctttcttcatttgatctagattgtgctcattagtcatatcacgaactgtcacaacaacaccacttttacctccctgttcaatcttgtcgatatagcttgtggtcacaacaaagaatcgtgcattcatttctaaatcacgcatttccgtttgttttgatttaaaagtatcttcaatttgtcttaataagaaagctttagcatcttcatcaatattgtccataatatcattcgccatcttattagataagataatttgtcgactctcattaatacctaggacaccttctaccatagagttaattaagctgtctctaatatttttagatgtggataatgcgtcgacatgctcttcgatttctgtactcatctgattaaatgcctgcgataattgaccaatttcatctttcgttgtgacagaaggtttataagagtaatccccttcagatacacgtgtagcttggtctcttaaacgtcttaaaggttttgtaattcttgatgataagaaaaacgcaaagactgttgtaattgttaagaaaataacagccgtaattatagtgataatcgtaatagcattatttgtatcttcgattgatttcaagtctttatatataaagactccactatatttgctatgactattcttctgtgcttttgttggatagcctaacaaaatatatgtttgagatgagcccttttctttaatcgttacatttcgagtaacagatttacctttatcaaacacatcgtcaaaatggtcgttgttgactacttcattcaacatttgctttttaatattagaaagtgaagccgttgattgacgatgtttattatttataatcatcaacccaccaggattttcaattaatgtttgactatattttattgcttcttctttattatgtgattgttcgaccagtgaacttatacgtctagcatcttctcttatggcattttcggtttcttgtgtgaaatagtattgcataaaggtaattaaagcaatacttaataaaattaaaactgtcgtcactattaaaataatagttaaccacagtttaattacgacactatttagccggctcatcattagatttaacctcaaatttatacccaacgccccagactgtttgaatcatatgcgcagcttcactagacacacgatttaacttttctctaagtcgtttaacatgagtatcaactgttcttaaatcaccatagaattcataatgccaaacttcttttaataattgttcacggtcaaatactttatttggtgttttagctaaatatattaataattcgtactctttaggagtcaaattaacttcttgattatcagcaagtacgcgatgtgcatcattatctatttctaaatgtttaaattcaatcacatcacgtgcgtgaggttcgctttgttctacagttgtagattgcgttcttcttagaagtgctttaactcttaagactacttctcttggtgaaaatggtttgacgatataatcatctgcaccagattcaaaaccttcaacacggtttgtttcttcacctttagcagtcaacataataatcggtgtttgtttatgttcacgcaatttagttgccacctggataccatccatttcaggcaacattaaatctagtagtatgcaagcataattattctccattgcaagttcataagcctcttggccattacttgcttcatggatttcaaaagattctctttctaaatacattttaagtaatcttctgattctatcctcatcatctacgataagtatttcgttcgacatacaggtcatacctcccacacatgcttttctttacaaaagtattatatcacaggaaagcgcatacagttattaaaaacctaaaattttgtgaaaaaattctcaaactttgtgataaatacatattttatttaattatttcccatgttctgctaaatgacgcatcacttttacttcatgaggcgtcaatacacgtccttcaccagcattcaaaccgacaacatttaaaggcccatattcaatacgagacagtttcgtcacttgatgaccaaaatgttcgaacattcttctgacttggcgattacgaccttctgtaattgtaatttcaaccaatgttgtgtttttatctttatcttgtttcttaactttcacttcagccggttgcgtcataccatcttctaattcaatacctttttctagcgctttcacttcttctctcattaaataaccttttaatttcgcaacatattttttcttaatttgatatcttggatgtgtcattaaattagtaaattcaccatcatttgtgagtaataacaatccagaagtatcatagtctaaacgaccaacaggataaatacgtgcttctatatctttaaagtaatctgtaaccactgtacgtcctctatcatcagatacacttgttatcacttgagttggtttatggaataaaatgtaaattttgtcttctagttctattttaataccttcaacttcaatcgtatctgatggcttcacttttgttcctaattcagtgacagtcgtaccattcactttcacttttccttcagaaattaaagtttctgccttacgtcttgaagtataaccgctattagctatacgtttttgtaatcgttctaattctttagtcattattttctcctttttgattgactagattactgaaaaaagcatccatttcttcatcgtcttcttcagttgtcggcaaatcttctatattggaaataccaaatacatttaaaaataaatcagtagtaattaactgttggctacgctgttcattaaccactttagcctcaactagtcctttggcaatcaatgtcttaactgcaccatctgaattgatactacgaattaattcaatatcacttcttgataatggctggttataagcaataattgatagtacttccattgctgcttgtgataatttcatttgtgacttttgttcaattaattgttcaatatacgttgccgcttcttttttagtcgttaaaacatacgtcgttccaaatcgttgtatcattaatccatgtgatgaataattttcaattaattcaacgagttggtctttcgacatatctaatatttctaatagttgtttttcatctaaaccttcatcgccagctgtaaataaaagcgactctaatataccatgattatccaaaatggtagttcactcctctaataatgttaatatcttcaaaattacgttgttgctcaatattaattattcctgcttttgacatctctaaaatagctaaaaagtgagtgactacttgttcaattggctcagaaaacgtaaacagactaaagaagttaaaatgatctttatctttcaatctcgatgtcacttgttctgtagcttgttgaatggtaaatgtctcttttcggatttcaacagatttaggtgtatttaactcaactctatttttaactctttgataagctacaattaattcagttaaatcaatcgtatgatttggatcccaagattcatctgtttccaaatgagataaatctgtcggtcttttagtaaaataaaaatctctttcttctttcatgtcatttaaaatagcagtatattctttataattttgatattctattaaacgcccaactaaatcttcccgtgggtcatcatcaacatccatatctgatgttgattgtggtaatagcatcttacttttaatcattaagagttctgacgctaatactaggtattcacttgcaatattaatttcaagctgtttcattgcatgaacgtactgcatatactgctctgttaattcttgcataggaatatcataaatatctatttcaaatttttggataagatgcagcaataaatctaatggtccattgaaagcatctaatttaacttcatacataatatctacctcgtattgcgtcatatgtgcataattctctaaaatattatagcatgaaaataacttacttttaaattggggtgataacaaaatgcaacaggcactgataaatttctattatcaatttcatactaagcaacattatttcctatgtcatgacattttagaagatgcatggaaagctgaaaataactacagtaagcaagatgcagttgttagtttaatcttgtttgcaactgcttgttaccattatcgccgcaataatttaaaaggcgcctataagtcttttaataaatctaaagaaataatacaaaatgctatagatagagatgcattataccttaatttaaatgattatcagttgttaattgagcaacagattgcaaaattgaatgcagcaaagcctttttcatctgttatattaccaataactccagactttgaacgcatcatcaaggctaactatccagattatgattataatcacgaaacagcaacagatccttttattgtagaccatcacatgcggcgtgatcgttcagaagtgattgcagcaaaagaagaagcgattcaattaagaaaacatagacgtaattaatcaaccaatttaaaaaagccacaatagcacagacatttttagtcatgtgtattgtgacttttgagttatggttcactttatgctctaggatgaaattggttatacatttttctaatttgagattttgaaacatgtgtatagagttgcgtagtagatatgtcagagtgacctaacatctcttgcactgctcttaaatctgcgccattttccaataaatgtgtcgcaaaagagtggcgtaacgtatgtggcgttaacgtctttttaatgtttgcctttacaccattttgtttaatcattttccatattgcttgtcgcgataaaggtttaccatgcatatttaaaaataagacttcggtaacagtcttttttaaaagttgcggtctaatcgtttcaatataagtagttaagtactcaatgactgcgtcgcctaatggtacaattctttctttatcgcctttaccaaatacgcgtacaaatcccattattaagttcacgttttctaactctaaatgtatcaattcagatacacgcattcccgttgcgtacagaagttctaacatcgtacgatcacgataaccattaattttatttagatccggcgtttctaataaagccaacacttcgtcaacatttaaaacgtcaggcaattttttgtcatattttggtgaatctaataataccgttggatctttcgccgcatatttttctcttatagcaaattgatgaaaactacggattgttgaaataaatcgcgcaatagatttagcagattgcccttggtctattaaatgccccaaacactcttgaattaattgtcgatctataaaatcaatatgcgagatatgatgttcagtcatataatcttgatactttttcaaatcacgtctataagcaccaattgtgttagaacttagtcctttttcaatttgtataaaacgcaaatattcttcaataattgtttccataaccacacctctaaaaaaagcgaaggttaatttaacctacgcaatttactatcctttacctttagcttggcacgtttcacacacaccatggaaagttaaacgatgatctaaaattttaaaattgaactcattttcaactcgattttcaacttctggtaacaaatcttcatcgatttcatctacacgaccacattccatacatactaaatgatggtggaaatgttttgcgccttcttttcttaaatcaaaacgagcgacgccatcaccaaagttaattttgtcgacaacttttagttcagctaacaactctaacgttctgtatactgtcgccaagccaatttcaggcgctttatcttttactttcagatatacgtcttcagcacttagatgatctttttcattttcaattagaactctaacagtagcttcgcgttgtggcgttagcttatatgatgattgttgtaattgttgcttaacgcgatttaatcgttcttccaacgatgtccactcccctactaataattaaaatcattacaaattatttcaaacttcacaattaaaactaacagttttctcaataaaatgcaagcttttctcatttgttatttagaatgattataatttaataataggtgttgcaatgcaatgatagtcttcgcatcttctatttctttattcattagcatcgatttaacattctcaatcggaactttaatgacttcgacaaattcatcttcatctaagtgaactgtaccttcttctaaattatccgtaaaatatattgataattgttcatcgcaaaaacctggtgaaccatacatatctacaacatgtgttaactctttggcaatatatcctgtttcttcttctaattcacgctttgccgcttcgactctatcttcatcatcttctaatttaccagctggaatttctagcaatggtttttctactggtttacgatactgtttcactaatacgacttcttttttaggtgtcactgcacaaacagcaactgcaccattatgataaactaattctcttgttgacgtttcaccgtttggtaatgtcactgtatgaatttctacatctacaattttgccattataaataactgttcgatcaattgttttttcatttaaatccattataatcacgttcctttaaattcatattatatattgatacactatgcttgttagctaaagtgtatcgaaaggagaactgacatgcaaaaaaatatattaaaaagtggtattgcattatctgaattaggtctaggttgcatgagtttaggtacagatttaaaaaaagccgaacaaattatagattgtgctgttgaaaatggtatcacttattttgatacagcagatatgtacgataaaggtataaatgaatcagttgttggtaaggcacttcttaaatatcaacaacgcgatgatattgtcattggtacaaaagtaggcaatcgtttaacaaaagatggcagtacaacatgggatccgagtaaatcctatattaaagaggcagttaaaggttcactaaagcgtttaggtatcgatcatatcgatttatatcaacttcatggcggaaccattgatgacccattagacgaaacaataagcgcatttgatgaattgaaacaagaaggaattatacgtgcttacggtatttcttctattcgcccaaatgtaattgattattatttaaaacatagtcaaatcgaaacgataatgtctcaattcaatttgattgataatcgtccagaatcattattagatgcaatccacaacaatgatgttaaagtattggcaagaggacctgtgtctaaaggattattaacttcaaacagtgttaatgtgctcgacaataaatttaaagatggtatttttgattattctcatgatgaattgggtgaaacaatagcctctattaaagaaattgaaagtaatttatctgcattgacatttagttatttaacatcacatgacgtgcttggttccatcattgtaggtgcaagtagcgtcgaccaattaaaagaaaatattgaaaactatcatactaaagttagtttagatcagattaaaacagcaagagctcgtgtaaaggatttggaatataccaatcatttagtgtagaagtcattttcagtaataaaaacagcagcatgaggcgtttcattataaaaatgccttactgctgttgtttatgtacaattcgctataatttatgattatgattactcacttatgatagaaattaaagcgttgtccttacgcatcagtatttagtaatttcgccttgcggcagtgccttaagcaaacttctgccacttcatctcttaataattttattaaaacatctttctatatttcacttcgcatgttgattcatcattattagttattatttgtacacccagcacatttccttgcaacacaagtagtttgaatttttcacaagtataatataatgtactgtctgaaatttggtctacagaaatatcgcctaaaatatccagcactgtaaattcttcaaatactgatagttgttccgcatatcgtacacaaagtcttaccacactctccgattgacagttcattgccatcccacctatttatgctttatttttaaataatttagggaaacatcgttcaaaaaatctaggcgcaatttgatacattttcaacgcatgatgcatccatttaggccgattaatttccaattgttttgttttaatgccataaatgatatcttctgcaagctgattagcatcaagcataattttccccatccttttagcatacttcattgatgggtcggctttttgatgaaaaggtgtatcaatcgggccaacattaactgtcatgatatgtaagtttggtgactctagtcttaaagcattcattaatgcataaaaccctgctttcgatgccccataatgtgcagcatttgcttgtgtggaaaatgcagcttgacttgaaatacctacaatatgtgcgttagatgttaaatatggtctcaacacagtatataaaacattaaaactaattaaattaagctgatacgtttcaatcatttctgaaaaactatggtctgaaatagatttgaaataacctaaacctgcactataaatgaatccatcgaatgatgtattgtcttcaaattgcagtgcctgtatcgacttcaaatcatttaagtcacaaggaataacatttatagttttccccaattcctgttcaaagattctagttgctttatcaacatcacgcaccaacaacgttacatgcactttattttctagtaactttcggacaatcgataaacctaaaccactcgtaccaccagtcactataaaatgttgtcctttcatcaattaaccttccttttcaattatatagaatgcaatttatcaactttacataattgagacaagttgattatctttcctaatatatatacaataataagaaaatataacatacaaatcaaaaactaaagggatgtgacgttaatgaaactcgtattttatggagctggtaatatggcacaagctatatttacaggaattattaactcaagcaacttagatgccaatgatatatatttaacaaataaatctaatgaacaagctttaaaagcattcgctgaaaaactaggtgttaactatagttatgatgatgcgacattattaaaagatgcagattatgtatttttaggtaccaaaccacatgactttgatgctctagcaacacgcatcaaaccacatattacaaaagacaattgcttcatttcaattatggcaggtattccgattgattatattaaacaacaattagaatgccaaaatccagttgctagaattatgccaaacacaaatgcgcaagttggacactctgttactggcattagtttttcaaacaactttgaccctaaatctaaagatgaaattaacgatttagttaaagcatttggttctgtaattgaagtatcagaggatcatttacatcaagtaacagctatcaccggaagcggcccagcatttttatatcatgtattcgagcaatacgttaaagctggtacgaaacttggtctagaaaaagaacaagttgaagaatctatacgcaaccttattataggtacaagtaagatgattgaacgttcagatttgagcatggctcaattaagaaaaaatattacctctaaaggtggtacgacacaagctggccttgatacattgtcacaatatgatttagtatctattttcgaagattgtctaaatgctgccgtcgaccgcagtattgaactttctaatgtagaagaccaataaaaacaaacccgccaacacatgtatgcatcatcgcaagcattgtgtttgacgggttatttttataaattattactatttggcaagcattgtttattactttgtcattagactttaaaactatcaaaatcttttacaaaattaaaattaggtgtatcttcattttgtatcaatgtttgataaatttcatttatatcttctgtattatagcgattgctcaaatgtgtaatcaacgtacgtttaacattggcttcttttatcaatgcaaatacgtcttcaatatggctatgatgataattgttggctaaatgcttttcaccatctatataggtcgcttcatgtaccatcacatcagcatctctagaaatcacacgttcattagaacatggttttgtatcaccaaaaattgctacaactggaccctgtttggactcacctctaaaatcttttgattgataaacttgaccattatgttcaaatgtatcatgagattttacttcttgatatttaggacctggttcaagaccaatgttttttaacgcttcaacattgattgtacctgtagtttcaggtgccattactctatatccatatgatggaataccatgattaagtaaatgcgcctctacagtaaaaccatcatgatgatatgtcagatgatcatcgatttcaatatatgtaattggatagtttaaatgtgactctgataaattcatagacatttccacatatgctttaattccttttggtccaaccaatgtaagcggcttctgttcaccgccctgaaaagaacgactagaaagtaatcctggcaaaccaaaaatatgatcgccatgcatatgagtaataaatatatgtgtcacttttcctaatttaattgcatgatgtaaaatttggtgctgtgtaccttcaccaacgtcgaaaagccatatggaattggaatatggttctaaatttaaggcgattgcttgtgtatttctctcttttgtaggcaaacctgcactcgttccaaaaaatgtaacttccatatatgcccctccttttcttcaattcattttatcataaaatttgtatcaatttagttttaatttatacttgaatcaaaatctgttaaaaattcgtctttgctagttaatttttctaactttaacgtagacataactatataaattttgacaattacgttatacttatcattaataagtatcacattaaacatgatacatgaatcgatatttcatttaagacactgcatactgtcgagcatattgaatgacctgctgaatggattatcttataataataaatcatatatctaattaagaattgaggttttaatcttgagtactaaaaacaaacacatcccttgtttaatcacaatctttggtgcaactggtgacttaagccatcgtaagttgtttccatcaatattccatctctaccaacaagacaatttagatgaacatattgccatcatcggtattggacgtcgtgacattactaatgatgatttccgtaatcaagtaaaatcatcaattcaaaagcacgtaaaagatacaaacaaaattgacgcgtttatggaacatgtcttctatcatagacatgatgttagtaatgaagaaagctatcaagaattactagattttagtaatgaattagatagccaatttgaattaaaaggtaatcgactattctatttagcaatggcaccacaattctttggcgttatttctgattatctaaaatcttctggtcttactgatacaaaaggatttaaacgccttgttatcgaaaaaccattcggtagtgatttaaaatcagccgaagcattaaacaatcaaattcgtaaatcatttaaagaagaagaaatttatcgtattgaccactatttaggaaaagacatggttcaaaatatcgaggtattacgttttgcgaatgcgatgtttgaaccattatggaataacaaatatatttcaaacatccaagttacatcttctgaaatactaggtgttgaagatcgtggtggttattatgaatcaagtggtgcactaaaagatatggtgcaaaatcacatgttacaaatggttgcattattagctatggaagcacctattagtttaaatagtgaagatatccgtgctgagaaagtaaaagtacttaaatcactacgtcatttccaatctgaagatgttaaaaagaactttgttcgtggtcaatatggcgaaggctatatcgatggtaaacaagttaaagcataccgtgatgaagatcgcgttgcagatgactctaacacacctacctttgtttcaggtaaattaacaattgataactttagatgggctggtgtaccattctatattcgtactggtaaacgtatgaaatctaaaacaattcaagttgtcgttgaatttaaagaagtaccaatgaacttatactatgaaactgataaactattagattcaaacctattagtaatcaatatccaacctaatgaaggtgtatctttacatctaaatgctaagaaaaatacacaaggtatcgaaactgaacctgttcaattgtcttattcaatgagcgctcaagataaaatgaatactgtagatgcatatgaaaatctattattcgattgtcttaaaggtgatgccactaacttcacgcactgggaagaattaaaatcaacatggaaatttgttgatgcaattcaagatgaatggaatatggttgatccagaattccctaactatgaatcaggtactaatggtccattagaaagtgatttactacttgctcgtgatggtaaccattggtgggacgatattcaataattgaattaaaacgcacatgttaaacaaaaataaatgagcgaatgacaaggattgattacgaatcaagtaaatcaattgttctatcattcgctttttttctagactatattatgaaattatattttacaatgcccaaaactattttaataatcattgaataaatgggtgtataatttatagaaataatgtagaataaaaataaatgattgaattaattggagtgaaagttttggacgttatcaagcaaatacaacaggcaattgtttatattgaagatcgtttattagagcctttcaatttgcaagaattaagtgattacgttggtctttcgccataccatcttgatcaatcatttaaaatgattgtcggcttatctccagaagcttatgcacgcgcgcgtaaaatgacactcgctgcaaatgatgtgattaatggtgctacacgacttgtagatatcgctaaaaaatatcactatgcaaattcaaatgattttgcaaatgattttagtgattttcacggcgtatcacctattcaagcttctactaaaaaagatgaattacaaattcaagagcgattatatatcaaattatcaactactgagagagcaccctatccatacagattagaagagacagatgatatttcattggttggatatgcacgatttatagacactaagtatttgtcacatccttttaatgttccggattttttagaagacttgctcattgatggtaaaattaaagagttacgacgatataatgacgttagtccatttgaactatttgttattagttgtcctcttgaaaatggtttagaaatatttgtaggtgtaccaagtgaacgttatcctgcacacttagaaagtcgatttttacctggcaaacattgtgcgaaattcaatttacaaggtgaaattgattatgcaactaatgaagcttggtactatattgaatcaagtttgcagttaacattgccatatgaacgaaatgatttatatgttgaagtgtaccctctcgatatttcatttaatgacccattcactaaaattcagctttggattcctgttaaacagagtccttatgacgaagattaaaaattaaaaacaaagaagccccctaatatatctataggtctacaaatggcctcagattctattagggggcatattaatatgttaatttagttcgataacacatgcttcatatggacgtaactgttttaaattaactttggcatcataattaaatagctttacttctccatggcttaaatcaaatggtacagttaattctgcttcgtggttagtaaaattacctacaataagaacttgcttttcatttaatgttctcgtgtacgcaaaaacttgtgaattttcagcatctactaaatcaaattgaccatatacgtatacatcattagactttcttaattgaattaaatctttataaaattgtaatactgaatgctcatcttctaattgttgtgcaacattgatagttttataattcggattcactgggaaccacggttcaccatttgtaaatcctccatttaacgtatcatcccattgcattggtgtgcgagaattatctcggttctcatctttatatttcgcaagtaaagcgtctacatctccaccttgagctttcactatttgatagtcatttttaacagcaacatcgttaaacgtttcaatactttcaaatggataattcgtcataccaatttcttgaccttgataaatgaatggcgtaccttgttgcaagaaataaacagctgcatgacttgttgctgattcataccaatacttgtcatcgtcaccccacgtcgatacacgtcgtggttggtcgtgattttcaataaacaacgcattccaacctttattttcaagttgtttttgccatctatttaatacagatttatacgaatttacatcaaagtgagaatcaccactattccacagtcccaaatgttcaaattggaatatcatattaaatttaccattttcttccccgacccagtcatcagcatcatcagggcttacaccattcgcttcaccgacagtcataatgtcatacttacttaatgagcgatctttcatctcttgtaaccaagtttgtatacctggctgattcatatctacatcaaatgctggggcatatgttttaccctcaggtacaggtaagtcacccgcttcaaacgtcttcttaatatgcgtaattgcatctactctaaatccatcaatgcctttatcaaaccaccagttcatcatttcaaatacagcatctctaacttctggattaccccaattcaaatcaggttgttttttactgaataaatggaaataatattgctcagtattagcatcatattcccatgtagatccattaaagatactttcccagttgttaggttcagagccatctggctttggatcttgccaaatataccaatcacgtttgggattgtctttactagatttagattctataaaccaaggatgttcatcagatgtatgatttacaactaaatctaaaataagcttcatgcctctatcatgaataccttttaataaacaatcaaagtcttccatcgttccaaattcatccataatttcttgatagtcactaatatcataaccattgtcatcattaggtgatttaaacattggactgagccaaatgacatcgatacctaaatcttttaagtagtccaatttatcaatcattccaggtaaatccccaataccatcgtgattactatcattaaaacttcttggatatacttgatatgctactgcttctttccaccattgcttattcattttaaaactcctttgctatcgctgtgttgattttcttatttttaattctgtatctataatgacgagttcaataacatcctgtgctttgtttttcaatatatttaaaattgctgaaccagcctgttgacctaacattcgaggcttgatgtcaatactggtttgaggtggtgacgcaatttcggttaaataagaatcattgaatgttgctgtcattacatcttttggaatttcaatattaagttcatatagcacacttaaaatcgctaaatgtaacatagcatctaacgaaatgattgcctgtttaatatttgggtccttcaagcgcgtatgtagattttgcatgtaattaaaaataacttttctttcattactagtctcaataatttgataatccagattaaattgtgatgcaaccgtttcaaatccttgaattctatcttttgaaacttcaaaatttcctttttctgtaataaatattaattcatctacaccttgttcaataacatgtcgtgtcaaattttcagaagctaatatattatcattatctatgtgtgtaaattgatgatctatatccgatgtaggcttaccaatcacaataaatggcatgctttcatcaattaacatttgtttaattggatcattttcttttgaataaagcagtataaacgcatcaaccattcgttgtttaatcattttataaacttcatccattaaatcattcatattatttgagactgtcgtttgtgtaccatagccatgctggttacacgtttcagaaattcctagcaatacattgatgtagaatggattcagtcgaataggctcctcagacccttttaacactaaaccaattttatatgtttggtttgtaattaaagttctagcagcggtattaggaaaataattcaattcttccataactttcttcacttttgaaattgtcgcttcgctaatacgttgatttccttttataactcttgaaactgtcgaaggagaaacaccggcttttagtgcaacatctttaatcgtaaccatttaatcacctcctgttaatttctgcatcggaaaacgcttccaaccactgtataataccagtttagtcacactttctaaaaaagtcaaaagatttgtgcaaacgattgcataaaacgataaaaataaaaccttcatactgaaattcaatccgaaaatcaatatataggtttgtataaatattaaaatcgattgtttagtcactaactgcaaaatagttaccttggccatcttgaaaattaaatacacgttgaccattcatttctactatatcatgcccagttaaacctaaatcatttaattttgagtataatgcatcaaagtttttctctttaaacattaaagatggtgttcctaggttcacttccgggctatacttttcaataaattcttttgccataatcgtcaatgacgtttcagcatctttcgtaggtgatacttcaactgcaacatagtcctcagctaacggtgtttcacttacaacaacaaattctaaagtttctgtccaaaatgctttcgctttgtcaacatcatcaacatataacataacttgatttaacttttccataagttaatacctctatttctctatagtacatgctatcataacacagtaaatattttattacttcacaaaatgcttaaaaatatggcgggatgcttttaaggtaatagatattgcttgtgtaattttttataggttgtagctactctatcacactctcttttatatttatcaaaagatataaaaaaggatagtatctttcaactatcctttaatcaatattattcttcaatccattgtgtatggaatacgccttctttatcttttctttcgtacgtatgagcaccgaagtagtcacgttgtgcttgaattaagtttgcaggtaaatcagctgcacggtaactatcatagtaattaatacttgatgagaaaccaggtgttggtacaccattttgaacaccagttgcgacaacatcacgtaacgcatcttgatattcagtaacgatgtttttaaagtaaggatctagcaataagttttgtaatcctggattattatcgtaagcatctttgatcttttgtaagaattgtgcacggataatgcaaccttctctccaaatcatagctaaatcaccaagttttaaattccattcattatcttcacttgctttacgcatttgcgcgaaaccttgtgcataagaacaaattttactcatatataatgctttacgaattttttctaaaaagtctttcttgtcaccatcaaatgatgcttttggaccatttaattctttagaagcatttacgcgctcttctttgattgaagagataaaacgtgcaaatacagattcagtaatgattgttaatggaatacctaattctaatgcgttaattgaagtccattttcctgtacctttttgacctgcagtatcaagaattttttcaactaatgcttctttattttcatctaatttcatgaaaatatcaccagtgatttcaattaaataactttctaattcaccagcattccagtctttgaacgtttgagcaatgtcttcatgagacatgcctaataattctttcatcatagcataactttctgcaattaattgcatgtcagcatattcaataccattatgtaccattttcacatagtgtccagcaccatttggtccaatataagtaacacatgaagcaccgtcttttgcctttgcagcaattgcatcaagaatatctgcaactttgttataagcttcttcttgtccacccggcattaatgacggaccagttaacgctccaatttcaccaccagaaacgcccataccaataaagttgattgcactttgtgctaatgctttattacgtctgatagtatcttgatagtttgtattaccaccatcaattaaaatatctccatcatctaataaaggtaacaaactatcaatcgttgcatccgtagctttacctgcttgaaccattaataaaattttacgtggtttttctaaagaattaacaaattcttccaatgagtacgttggatgaatatttttcccttttgattcttcaaccattaaatcagttttttcacttgagcggttaaatacagatacactatatccgcgtgattcaatattccaagctaggtttttacccataacggctaaaccaataactccaatttgttgtgtcatattacttacctcacttgttgatttttcattagtattgtatcacaaaatagacatacactacactaaatcatttcgattgtcgcgcaactattttgattatttctaacacttgacttgcaagcaagttcaatgatttaatcggcattctctcatttgttgtatggattttttcataacccactcctaaaatgactgaaggaataccaaatgtattaataatactgccgtctgaaccgccaccagaaataattgtatttgcagataatcctaaattacgagcactttcttgtgcaattttaactaccgcttcattatcattaattttaaatcctggataactttgctccactgtaactactgctttcccacctaattctgatgcagtagtttcaaacacatcagtcatatgtttgacttgtgtttttattctttctggatcgtgagaacgtgcctctgcttctaaaatgacttcatctgcaacaatattcgtagctgaaccgccatgaaacttaccaatattggcagtagttatttcatcaacttgtcctaatttcattcgactaattgctttcgccgcaatattaatagcactaacaccctcttttggcgtacttgcatgagccgttttgccaaaaattttagctgaaattaacatttgcgtcggtgcacctacaaccgtagtaccgacatcagcacttgcatcaatagcataaccaaagtccgcgtccaacaactctgaatttaattctttagcaccaattaaacctgattcttccccaacagtaatcacaaattgaatttgtccatgtgggatttgttgttcctttatcacttgcaaaacttcaagcatcgctgctaatcctgctttatcatctgcacctagtatagtcgtaccatcagagtatatgtagccgtcatcttttacaattggctttacattaattgcgggtacaacagtatccatatggctcgtcaaatataatttaggtacttcgccttcttcgatagtactattcattgtacacactagattattggcacctaatttaggatgtttagccgcttcatcttctttaacatctaaccctaatgctatgaatttttcttttaaaataggttggattgttgattcattccctgtctcagaatcgatttttacaagttctaaaaacgtattaagtaatctttgctcattaatcataatggaaccccttttatcaaaattttcatgtacgccaaacggtaaaaattgatgaaataaaatgttacagtaattgacgttacacagatttatcaggcttgtaaattgtgtcatattattttcaatttattatatatatttattgtaactcaaactaagctttgtcaaaaatatattgattgatttttcaaagatatcgtataatgaggaaaatgacataagcaaacttactcatgttttttattatattccttaatgatgattgctagttatatcgtctcaagttaaaagttttatatcttatgtcgtaattattaatacaaaggttattcatttggaggcacacaaaatgcaaaataaagttttaagaattatcattatcgttatgcttgtatcagttgtattagcattgttattaacgagtatcattccaattttataaactatatctcaactacctatacaaaatcatacaattaaaaatccatccgttataaacgcatgtattaataagttatcgtattgcaacgattactttcaaacatgggtcatacggatggattattttttaagctacttcactatgcattttcaatgaaccaaattgcgatttgatttgtaaatattcttctaattcatttaatatttgaataatacttgctctcgagttaagcgctttgtgtgttgttggcaatggcagttcatccaatttcaaacgcgtctcatacaaattgtgtaaacgcattgctgtatagtcattactattcacatttagaccaatttctttcagcagtgacgcaacatcatttaaaagcggatctttatgacagatactttcgatgagcggtttcattctcattaacaattccacttgctcttctcgcatatcaaaataatgatagtatgaattttcgtttctaacaaaatgatttttaacatctcggaacgcgatagacttcgcctttttaatatttaaaagtaacgcttcaaattcaatcgcaatggtatcttcatatttttcacaaatataactatatttactaaaaatatcagcaatttgttgctcaattttacatttgtattcgtctagttgtttgtctaaacttggcatcattaaattcattgtaaatgcaatgcttagtccaattaacagtaataatgtttcattaacaattaaatgtgcatcaattgattttgcattaaaaacatgaagtaatataacgcaactcgtaatgacaccttcttgtacttttaatacgacagttaatggtataaataacaatacgataataccgagtacaattggactctgacctaataaactaaatattgctgaacctaaaaacaatactaaaaaacatgatactaatcttgaaataatcgcttgtagcgaatgtacttttgtatgtttaatacataatacgactaatatggcgcttgaagcataattatctaaacctaacagcttactaataattacacctaaagtcatacccactgctgtttttattgttctaaatccaatcttgtaaggatttaactttaacatgggttagcgcctcttatctttcttcacaatatttattgaataatgtttgtaattgattaattacgttcatcacatcatgaccttcgatttgatgtctttcaatcatttctgtaatctttccatcttttactaatgcaaatgacggacttgaaggcgcataaccttcgaagtattcacgcgctctttgtgtcgcttctttatcttgtccagcaaatactgtcactagacgatcaggtaatacgtcataatgtaaagcatgtgatgctgctggtcttgcgataccacctgcacaaccacatacagaattgatcataactagtgttgtaccatcttgtttaagaactttgtcaacatcttctgcagtagttaattgctcatatcccgcagattcaatttcattccttgcttgttctacaacaccgttcatgtataaatcgaaattcatgtccataagttcaatcacctatccctttatatttaaactatcctcattctactaattaataacatattgttcaataaactaatctgaatcacaccaatatttagacacaattttaacaatataccaaacattattgtgcttaaaatcatggtaactaatttgttcacctgttttcattaatatgtttcaagtatgatgtattattttgactttactgcaaaaatgcattcaaccatgttgattattgttctttatctttttttgaatttattgcacatattttattgccaaaaaataatacatccatcgacaaaaacaagataaaacaagttgtcgatagatgcatctatgttatcactaatatatatttgtattttctaaagtatactgttcgatacgctgtttaatatgattcataaatttacctgtttgtaaaccatctaaaatacgatgatcaattgaaatacataaattaaccatgttacgaattgcaatcatatcattaattactactggctttttaacgattgattctacttgtaaaatcgctgcttgaggatgatttataatacccattgatgatactgaaccaaatgtaccagtattatttaccgtaaatgtaccgccctgcatatcttcagctgtcaattgcttattacgcgctttcgttgctaaagtattaatttctctagctatacctttgattgacttttcgtctgcatgcttaatcacaggtacgtataatttattttcatcagcaacagcaattgaaatattaatgtctttatgtaagacaatttcatttccttgccagctactatttaataaaggatatgcttttaaagcatctgctacagcttttacaaagaaagcaaagaaagttagattatatccttctttatttttaaagctgtttttataatgatttctcgtattcacaagatttgtagcatctacttcaatcatcatccatgcatgtggaatctctgttacactattaaccatattttgcgcaattgctttacgcacaccatttactggtattgtgctgttttcactattgtcttcagatgattggttacttgatgtatctactgatgttgattttgtttgaacttgtttgtcagattgaactgtggtaccaccattttcaataactgacattatatccttcttagttacacgaccttcaaatccactacctacaacttgtgataaatcaatgtcatgctctgaagcgagtttaaatacaacaggtgaaaagcgaccattattacgaggttgattttgtttagcagtagatgtctgttctactgttgcactagcttttttagtagatttctgagtatgctcatccacttttgcttgtatctcttcagttgtttcatttgtcttttcatcagcagtttcaattttacagataattgtatcaatagctactgtctgccccgcttcaactaaaatttctgtaattgttcctgatatcgtggaagggacttcagctgtcactttatctgttataacttcacataatggttcatattcatcaatatgatcaccaacagaaactaaccattgttcaatggtaccttcatgaacactctcacctaacttaggcattgttatttccatgactttccctccctagaattctgctaattcacgcattttatttaagattttttctggattcatcataatttcattttctaatacaggagaaaatggcatagatggtatatctggagcagctaaacgcatgattggtgcatctaaatcgaacaagcaatgctctgcaataatcgctgacacttctgacataatactaccttctaaattatcttcagttacaagtaaaactttacctgtatgtttagcacgatcaataattgtttctttatctaatggataaacagttcgtaaatcaacgacttcaacgttgataccgtctgcagctaaaatatccgctgcttgtaaacaataattgaccattaatccataacaaaatactgttaaatcttcaccttcacgtttaacatctgcttttcctaaaggtacagtgtaatattcttctggcacttcttcctttaagaaacgataagcttttttatgctcaaagtacaatactggatcatttgattcgatagatgataataaaagccctttagcatcatacggtgtggaaggaataacaattgttaaacctggtgatgaagcaaatatactttcaatactttgtgaatgatatagtcctccgtgaacaccgccaccaaatggtgcacgaatcgttaatgggcattgccaatcattatttgaacgataacgcattttcgcagcttcactaataatttgatttgtcgcaggtaaaataaaatctgcaaattgaatttctgcaattggtcttttacctaccatagctgcaccaatggcagttccaacaatatttgactcagctaatggcgtatcgataactctgtcttcaccatattgttgttgtagtccttgagtagtaccaaatacgccaccttttttaccaacatcttcaccaagaataaacacatctttattttgttgtaatgctaagtcttgtgcctggcgtatcgcctctaaataagataatttagccattagttaagactcccttcttcgtacacaaatgcataggcttcttcgacacttggatatggcgcgtcttcagcagcctttgtcgctttattgatgatgtctttatgctccgcttctatttctgccaaccaagcatcatcgataatgccagctgaaagcaactcttttttgaacttttcattgcagtctgcttttttaagcgcttcacgctcttctttcgtacgatattggtcgtcatcatctgatgaatgagctgtcatacgacttgttactgcttcaatcaaagttgaaccttgaccagaaatagctcgatctcttgcttctttcatcgctttatacattgctaatggatcattaccatctacttgttcaccatgtataccgtaaccaagtgctctatccgataatttttcagctgcgtattgtaatgaatcaggtactgaaattgcatatttattatttataatgacacatacaaaaggaagtttgtgtacacccgcgaagtttaaaccttcatggaagtcaccttggtttgagctaccttcaccaacagttgctgttgcaattttcttcttaccatccatttttaaagctaaagcagcaccaacagcatggggtatttgagttgctaccggtgaactttgagacaaaatattcttagctctactactaaagtgtgatggcatttgttttccaccagagttaacatcgtctttctttccaaacgctgataaaaacgtatcatacgctgagatacccatataagtaacgaaagctagatctctataataaggcgctgtaatatcaccttcttctaatgcgtatgccatcccaatctgagttgcttcttgtccttgaccacttacaacaaatggaattttacctgcacggttcaataaccacagtctttcatctatttttctacctaaatccatccatttatatattacttttaggtcttcttcgctaaggcctaatgatttataatcaatcatgttaaatcctcctatttatacgtgaatagctctactttctgctttcaatcctaattccatcaacacttcagagatggaaggatgtgcgtgtgttgttagtcctaattctaatgccgagccattcatgaactgtaacagtgatgcctcattaatcaattctgttacatgtggaccaatcatattaatacccacaatttcttcagttgattgatcaatcaccatttcgctatacccttcgtttgcgtcatggctatcaatcactgctttaccaattgctttaaatggtactttaaaacttttaactttcattccctctgcctttgcctgctcaatgtttaaaccgatagaagcaatttcaggttgtgaataaatacacttaggcatcatgttatagtttactgggattgggttcccttcaaacatatgatcgacagccacaacaccttcttttgatccaacatgtgccaattgtaattttccaatacaatcaccagctgcataaatatgtttatcttcagtttgttgaaattcgttcgttaaaatatgtcctgatgttgaaagttttattttagtgttgtttaaacctatatctgatgtgttaggttttctaccaatcgatagcaacactttatctactttaattatgtctgaggaaatttcaaacgtaacaccatcttcgttaacatttatatcattttcagaaagttttattccctcatagaatttaacaccacgtgctgacaatgatttttttaatagttgtgaagcttgtttactttcagttggtaaaattctttcacctgcttctataactgttacgtcaacacctaaatctatcatcaatgatgcaaattccattccgataacaccaccaccaataataccaatacttgatggtaacgtctttaatgataatatatcatcgctagataaaattttatcatgatcaaatgataagaatggcaactctgcaggcgaagaaccagttgcaattaatacaaattggtttggtaataagtctgattcaccatcttcatattcgacagaaattgtgccactttgaggtgaaaatatagatgtacctagaatacgtcccgtgccattataaatgtcaatgtgattgtgttgcattaaatgctttacaccttgatacatttgattaataatgtcttcttttcgtgccaacatattttcaaaattaacattagcatctttgacatcaacgccaaacattgctgcctgttttactgtttgaaatacttcagcagatttaagcagcgatttagtaggaatacaacctttatggagacaagtacctcctaatagttgtcgttctactattgccacttttttacctaattgagacgcacgtatcgcagcaacatatcctgcagtacctccaccgagaacgactaaatcatattgtttctctgacatgttcttactcctaactaatgatatatatccattgaaaatttattaatacatagttttcatgtccattaattacctattttacatgattgtctatttagtttgaatgcacataaataaatccataaatgagtattcaacacactttggaaattatctacgtctttgattgtgttgtatcatttctcttgcattttctcgagttaaatcagtaacacttgcacctgaaatcattcgtgcaatttcatctactttatcatcgctaattaactcttgaacttgtgttgttgtacgatcatcttttgatgatttcgaaattaataaatgatggtcgctcatcgatgcaacttgtggtaagtgagagatacaaataacttgtatatattcagctatatctcgcattttctctgccattttttgtgcagcttgtccagatacacctgagtcaacctcatcgaataaaattgcagtttgacctctcgatttaacaaaaatactttttaacgctaacataattctagaaagttctccacctgacgcaattttatttaaactttttaatggttcccctttatttggactgattaaaaattctacaaattcgattccatcaatattcggttcttctaattttttaaatgaaatctcaagatttgcgtctttcatttgtaagttttgaatttccgatacaatgtggtctcttaactccctagcgactatacgacgctgctttgataacgcttgtccaacctctataacttgattatacaatgcatttatttcttctcgtaactgcgatgtactttgttcatagttttcaattttattgatttcattattaagcttttcttgatatgcgattaattctgaaatatcttttccatatttacgttttaaattattcagcaaattcatacgagattcatactcgtttaacacttgttcgtcgaattctgtattagccatttcatcatataactcatgttttgcatcttctaaaatgtagtaaaattgatcaatatcttcttttaatttgtcatatttgtttggaactatatcgtttattgttaacaaatggttgcttagttcatacaaacgatcagtgatagcattttcatccgttaatgtcatatgtgcgttattaagcgctaagcttaatttttcagagttttgaatgcgtttaatatctatttcaagttgctctatttcgccttcttttagatgtgcttcagacaattcttctaattggaatttcattaaatctaaacgctgcagcaatgcttggtctgctgattctaaatcttctaactcttgctttttggctttataattttgaaaagtttgatgatatttatccaacaaatcttgataacgtgattctgcgtaattatccaataatgttaaatggtatttttgtttcaacaaagactgcgtttcatgttggccatgaatatctaataattcttgcataacttttcgtaaatcttgtaaagtaactgtttgattattaattttacaaagacttttaccagagctgaaaatttcccgtttaactaataaaaaatcttcatctacatcaatatccatatttttcaatatatgtatagcatctttactctcgtcaatatcaaatataccttcgatgacagcctttttttcaccatgtcttacaaaatcagatgaagctctcattccaattaattgtccaattgcatctataataattgacttacctgaacccgtttcaccacttaaaacagttaaaccatcagaaaattgaatttctaactcttcaataatagcaaattgcttgattgataaggtttgtaacataaactcatcgcatccttataacaaattgaaaattcttgacttgatttcatcacttgcctctttgcttcgacaaataattaaacaagtatcatcaccacaaattgtgcctagtacttcttcccaattgatttggtctaatatagctccaatagattgtgcattaccaggtaatgtttttagaacaagtaaattatcagtaccatctatattaacaaaggaatccattaaataacgtcccaatttttctaaaggatggaattttctatcatttggtaaactataaacatattgacctgaaggtataggtactttaataagttgtagttctttaatatcacgagaaacagttgcttgagtgacatttaaatcataatcgtttaatcgtttaactaattcatcttgtgtctctatctgttcatttgaaataatttctctaatttttatatgcctaaccgattttttgggcacagtaaacacctctgattacgaatatttatacatttattttaacacatgcactgatttacgactactaaacacctttacgtaaaaagggtaaacatggtttatctatcttggttatctatttataaatatttttcatattacgcataacaattgcttaaaatatgtataaaaatgaatatatgtgtaataaacttgctaattattagatttaataagcgtcaattgtttgaacatatttaattaaaatcacattgatatcacagatacgaatattgtcgtatagaaattgaaaattctattttttaaatgaaagtcttcaacataattttaagtttcaacatgagaaaaatcgattaacaaacaacgtcagttgaatatgccttttgagacatttcaaactttacaattgttgctaatcgatatatttgcttttagtgatccctgctataaaataaatcaacgatttctaataagtgttttgtattgaattgttcatcaatttgcgttagttcatccactgctgcgtctctatgataagtcaatttatcttctgcgccatctttccctaataaactcacgtacgtacttttattattttcaagatcgctgcccacttttttacctaactttgcttcatcaccatagcagtctaataaatcatctttaatctggaacatcatacctaaatgataactataactttctaaatgttctttagttgcatcatcgacattagcgatatctgctgcactcataaccgcaaaagttaataatgctcctgtttttgttttgtgtatcatttccaaagtttcaagatcaattggttggccttcgctttgcatatctaacatttgaccgccgaccattccaacatgaccacttgctattgacagccgttgtagaacttttatttttacttcatcagttaatctatcatcacttgaaataagttcaaatgctttagttaataaagcatcacctgctaatatcgcagtccactcaccatatactttatgatttgttaattttcctcgtcgataatcatcattatccatcgctggtaggtcatcatgaataagtgaatatgtatgaatcatttctagtgcaattgcgctcttcatacctaactcatactcggtatttagtgaatctaaagtgagtaataacagaactggtcggatgcgtttacctccagcatttaatgaatacaacatactttcttctagctgagtatccattactgatttatttatcgcaaccgataattcattattgacttcatctattaatttattcatcggtagattcgtcattttttacatcctcagcttcttcttttattaagtcattcacctttttttcggcattttttaaagttgtgtcacaagctgctgatagtttcataccacgttgatataaatctaatgattcctctaaagatactgtttcattatctaatttttgaacaatttgctctaattcttgcatcatttcttcaaaactttgcgtttctttagtcattattacaccttactttcgtaacttttgcatctactaagccatctttcattgttaacgtcaattgatcattttctgttaaatctttagtactcgtaatgacttcgtcttttttattaacaattgcatatccacgcaacattgtattagttggacttaaattgtttaagttttctactttatttttcaaatcatttttataacttaatatcttagaattcaataatttaacaagttggtttgtcaattgaagattattttgttgttcttgattaacactacttagtaatgcttttaaattatagcgttgttgcaacagcattaatcgatgtctctgttgttcaaaagttgcctgaatttgttgtttcagtctcttttctaaatcatctcgacgttgtatctgttgatcatacaataaagttggttgtttaaacttgtaatacgatgacaaatgttcaacatgtttacgttgttgttctaaatgtttcttgatgaaacgagtcaatgtaaactgatattgctgtatttgttgcagcaattcatattggtctggtgttgcaataacagcagcttgagttggagtcgcagctctgatgtctgcagcaaaatcacttaatgtaaagtctgtttcatgacctactgctgatataatcggtgtcttacaattatatattgcacggacgacagcttcttcgttgaaattccataaatcttctatggatccaccacctcgacctacaataatggtatctacacctaaactatctgcatattcaattttttcaataatgtcgtcttttgctttttcaccttgaaccaaagtactaatttgtatttgttcagctaatggaaaacgactatttatcgttgaatggatatctcgaattgcggcacctgtactcgctgttaaaactgcaatttttttaggaaacttaggtattgatttcttattcgctttatcaaaacaaccttcttcagttaattttttctttaatgcttctaatttttgatataagttccctataccatctaattgcattttatttacataaatttgatagtttccacgacgttcaaaaacagaaacacgtgcttctaataagacttcatctccttctttaggttcgaagtttaatttagaagcactacctttgaacatcatggcacttataacgctctctttatctttcacattaaagtataaatgaccacttgaatgctttttaaaatttgaaagctcacctttaatcaatacagattggagatgtggatcttgatcaaatttatatttaatatatttcgttaaagctgaaacacttaaataatctgacatataacatcactcaattttatttttttatattactcaatacaccatttataaatttataatgatcatcatcactgaattgttttgttaattcaactgcttcattcattacgactttagcaggtgtatcactgtgtaatatttcatatgttgccattcttaaaataatacgatccgtttttaataaacgtgcaatagtccaatcttttaaataaggactaattgtctcgtctaatacaggttcgtgatctttaacgccagaaactagccaatgaataaattcgaagtctaaatctggattatcgtctttaataaagcttatcgcttcatttatcgttaaatcactgtccttcatttctaattgaaataaagtttgaaaagcttgcactcgggattctttacgactcatttttaactccttcaaacgtttgtatttttctttatttaattactgaattaggtatgacattacttttcaataacgatttgtgtaatgtgaatattaatttgcttaggttctatcgctgtcatattagaaattgaattaaaaattgacgtttgaattttgtttgcagtttttgaaatattaacaccatgttttaatgcacaatatacatctatatatatgccatcttctttactctcgatttttaaatcacggcttaaatttttacgactaactttttctaaatttgtttcttttaattcagcaaaatggccagtgatgccttcgacttccgaagtagctatacttgcaataacagatagcacttctggcgctatttctactttacctaattttgaatttgaataatcagttactttgaccatggattgacctcctattaaccttcatcattcataatgctattttgctctaaaaagtttgtattaaatttaccgcttctaaatatatcgttattcaataatttaatatggaatggaatagttgtatcaataccaagaaccacaaattcacttagtgcacgaatgccagccataatcgcttcatctcgtgtcggttcatgtatgattaatttcgctaccatcgaatcataatatggcggtatcgtataattagtataacatgctgactctattcgaacaccatatccacctggtgcaagatattgctcaattttacctggtgatggcataaagttcttgtaaggattttcagcattaattctaaattcaattgcgtgtcctgttaatttaatatcttcttgtttatacggtaacacgtcacccatagcaacttgtaattgtaatttaactaaatcaattcctgttaccatttcagttacaggatgttctacttgaatacgtgtattcatttccataaaataaaatttattatcatttaaatcatatataaactcaattgttcccgcattttcataatttacagctttcgctgcacgaactgcggcatttcccatttcacgacgtgtttcatcatctaaaattggggaaggtgcttcttccactaatttctgcatacgtctttgaattgtacaatcacgttctcctaaatgaattacattaccatagctgtccccaacaatttggatttcaatatggcggaagttttcgatgaatttctccatataaagtccaccattaccaaatgcagtttgagcttcttgttctgtcattcggaagccagtttcaagttctttttcatcacgagcaacacggataccttttccgccaccaccagcagtagctttaatgatgaccggatagccaattttcttagcgattttcttagcttctgagacgtctttcattaaaccgtcactaccaggaacaactggaacattggctttgatcatttctgccttagcaacatctttgatacccattttttggatagattgataacttggtccaatgaacttcaattggcatgcttcgcataattctgcaaaatcagcattttcagctaaaaagccataacccggatgaacgccatcacaacctgtagaagttgcaatagataagatgttcggaatatttaaatatgaatctttagacaaagtgggacctacgcaatatgcttcatcagcaatttgagtatgtagcgcatctttatccccttcagaatagattgcaacagtttggatgcctaaatcacgacaagcgcgaataatcctaactgcgatttcaccgcggtttgcaattaaaacctttttcattatttcaccttaaataacggttggccatactctaccatttgtccgtcttctactaagatttcaacaatttcacctgaaatttctgcttgaatttcattaaatagtttcattgcctctaaaatacacactgttgtttcatttgaaacagtgtccccaacttgcacatatgcttcttcgtctggagatggcgatttgtaaaatgtacctaccataggtgcattaattgttttgtgattatctgaagttggctttggagcttcagttttattgctatcagttgattgtgcttgaggcataggcattgccgcagcttcaactggcatttgtgagatttgtggcgtgataatctcagtttctttttctttcttaagcgtcactttgcctttagtatcttcaatattgatttccgttaaagttgatttatccagaatttcaattaattctttgatttctttaaagttcattattactgactccttcagtttgttttcatctacccgtctattttacttgagacaactcttcaattcaagcatgttcatattgctggcgacattataagtctatcccaaagttataataaaaccacattttaaattaaaaacacttgtgtatttattacttaacattgactcatcttaactcttgattaaaaattttatgcattcagttaaacatatcaatgttatttttattagctattatgttttatcctcaacaatatgatatgtagatatatacctttacttatgtctatgttttttcactaccaattagacgattcgttttatattttaaaaattattttaaaaataaaaagcctcatatcagcatataacctataatcattttaggcaatagctttatgagacttatttagaatatcttacgttaaatcagtatagtgaatacaagctatttgttaacaaattagagattatcctcttgaaatgtagcttccatcaccagtgttgataattaaaacgtcaccttcgtttacaaataaaggtacatttaatgtataaccagtttcaacagttgccgatttagtagcaccagttgcagtatcacctttaataccaggttctgtttcagttactgttaattcaacagttttaggtaattcaacaccgatagtttcaccttcgtatgtttgaatttgtacttccataccttcttttaagtaattcaattcttcttttaagtaatcacttgaaagttctgtttgttcaaagctttcattatccataaatacatgattatctccgtcagcatataaatattgcatgcgacgattttcaatcattgctggttcaactttttcaccagctctaaacgttttctcttgaattgcaccagttcttaaattacgtaattttgaacgaacgaatgctgaacctttaccaggctttacatgttggaagtctataactttccaaatagcgttatcaacagaaattgttaaacctgttttaaaatcattaaccgaaatcattcagtttcctcctcattttacacgcttatgttaaaactataaggtcttttgtgcatttagtaaagacttgacaaccattttctgtaattaaaatatcatcttctattcttataccgcccaaaccttctatataaacaccaggttctactgtaacacagttgttaacttgaagtttatcttgtatcgtacgagccagcattggcccttcatggatttctaaaccaataccatgtcctagtgaatgtccaaattcttttccatacccttttgactctaaatagtttcttgaaatggcatcagcttctgcaccagtcatgccaggtctaatctcattaattgctttcatttgagattcaagtactatttgatatatttctttcagtttaggatctggttctccaatagcaaatgttctagtaatatctgaacaatagccgttataatacgcgccaaaatctaatgtaatcatgtcgcctttttcaataattttatcacttgcaacaccatgtggtaatgcacctctatgaccagatgctacaatcgtatcgaatgatggtccatctgctcctaattctagcattttgctttctaatattgcctttaattctttttcagtcatgcctgcttttacaacagttaaaatatattcatatgtttcatcaacaatattagctgctttttgaattaaagcaatttcgtcagcatctttgacgtctctaattttatctacagtattagaaatgcttattaatgatatacggcttttatttaattcaaggtatgtatcataacttacatgatgcccctcaaaacctacattttcaaaattttcttggtgtagcaattctttaatctcaccaataatagtagatttacgattaataatttcataatttggcgcctgcttagttgcttgatcaatatatctaaagtctgttatcaaatattgtttatctttagatatgataagtgctccactggtaccagtaaaacctgataaatatcttctattgtaatccgaaagaatgataatcgcatctaaatgtttttgttctaaaatacgatgcacttgtgttattctgctcatcttattacctcctagtgaaacgtttgtgcatttcaactttatacattaaaataatatcataataaggataaaaaataatagatattgattttagggagatagtaatgaaaaaattggtttcaattgttggcgcaacattattgttagctggatgtggatcacaaaatttagcaccattagaagaaaaaacaacagatttaagagaagataatcatcaactcaaactagatattcaagaacttaatcaacaaattagtgattctaaatctaaaattaaagggcttgaaaaggataaagaaaacagtaaaaaaactgcatctaataatacgaaaattaaattgatgaatgttacatcaacatactacgacaaagttgctaaagctttgaaatcctataacgatattgagaaagatgtaagtaaaaacaaaggcgataagaatgttcaatcgaaattaaatcaaatttctaatgatattcaaagtgctcacacttcatacaaagatgctatcgatggtttatcacttagtgatgatgataaaaaaacgtctaaaaatatcgataaattaaactctgatttgaatcatgcatttgatgatattaaaaatggctatcaaaataaagataaaaaacaacttacaaaaggacaacaagcgttgtcaaaattaaacttaaatgcaaaatcatgataggagtcttttaatgcgtaatataatattttatcttgtacttattattgctgcgattggattagtaatgaatctagatgtctatattttttcaatcgtcagaatgttaatcagctttgctgcaatagctggtattatttatctgatttattatttcttcatcttaactgaagaccaacgcaaatatcgcaaagcaatgcgtaagtataaaagaaatcaaagaagaaaatagataaaaaaacggaagcacttgtaggtaaaatagtctacgtgcttccattttttattctaaaaactactttctaaacatccattcatctgaacgatatttttcagttaattcttccacttctgccaattgagcttctgttaattcaagtggctttaattctatatttaaacctttcttaaaacctttctcgaaagcttcttccatttgactaatagtaatgtgtttatctgaaatatcattgatggcaactgctttttcaacgaatgcctctttcatttttaattttaatctttcatttttataaataaacatatcaaacagttcatcaatatcaatatcttgtaaaatcgaaccgtgttggaggattacgcccttttgtctcgtttgagcactcccagcaatcttacggccttcaacaactagctcataccaacttggtgcatcaaaacacactgaacttcgaggttgttttaatttttgacgctcttcaggcgttttaggtaccgcaaaataagtattaaatcctaagtttttaaatccttctaataatccttgtgaaatcactctgtacgcttctgtaactgtagaaggcatattcggatgcgattcaggcacaatcacactgtaagttaactctttatcatgtagcaccccacggccaccagtttgacgccttacgagaccaaaacctttctctttaaccttatcaatatcaatttctttttgtagcctttggaaataccctattgataatgttgcaggattccatgtgtaaaaacgtataactggatcaatttcacctctagagacaaaatttaataacgcttcatccattgccatattataatatgggtctttacttcctgtattaataaaattccaagtttcagtcatattcaagaactcctatcagcaaaatgtataatatttgattcgctaattaatcaatttaactaaatgaataataattgcaattctttagtgaaatattttgataatttgacctaacagtcttataattatattatcgtttaattagggaggatgcaagatgagtgctagtttgtacatcgcaataattttagttatagcaattattgcttatatgattgttcaacaaattcttaacaagcgagctgttaaagaattagatcaaaatgaattccataatgggattagaaaagctcaagtcatcgatgttagagagaaagttgactatgactacggtcacattaatgggtctcgcaatattcctatgacaatgttcaggcaacgattccaaggattaagaaaagaccaaccggtatacttatgtgatgccaatgggatagctagctatagagccgctcgtattttgaaaaaaaatggatatacagatatctatatgttaaaaggcggctataaaaaatggactggaaaaataaagtctaaaaaatagttttgtaaatttaatatacgatttaataaaatctgagtgttaattgatcatcaataacaatactcagattttaattttttaacaaagtctgttactatatttctctagcttcactaatcattaaacttagtttcagcataataaagaaagttcagctcattttcaatacgattcaattaccgcaatctaaaaaatgaaaagacaatttctatgaaagaataataccaaaccctaagagttattacttcggtttagttttcttgtttaaatagaaattgtctttttcaattgattttgaaaccattatccttaaatcttcatacaaagttagaataataattctcggaatatgtgtttaatactttatttttcctgtttaagattttcaaactttaatattggtttacgagcagctgtagcttcgtctaatcgatcaatcacagttgtatgtggtgcttctagcactttatcaggatcatttttagcttcttcagcaatactaattaatgtatcgataaaataatcaagtgtttctttagactctgtctcagtcggttcaatcatcataccttcttcaacatttaatgggaagtatattgttggtggatgtacaccgaaatctaataatcgcttagccatgtctaaagtacgtacaccaaattctttttgacgcacaccacttaacacaaactcgtgtttacaatattgtttataaggtatttcaaagtgttcagataaacgtgctttaatataattcgcattaagaaccgctgcttcagaaacctctttaagtccagttgctcccatagttcgaatatacgtataagctcttaagtaaataccaaagttaccataaaatggttttacacgtccgatagaatttttaatgtcattatcatatttaaatttgtcgccatctttaataaccattggctttggtaagtaacttgctagttcttttactacaccgactggacctgaaccaggaccgccaccaccatgtggaccagtaaatgttttatgcaagtttaaatgaacagcatcaaatcccatatctcctgggcgaactttgtccataatagcgtttaaattcgcaccatcataatataatagaccaccagcattatggacgatttcacggatttccataatatttttttcgaaaatacctaaagtgtttggattagttaacataatagctgctgtattttcatttacaacacgtttcaagtcatcaatatcaacttcgccacgttcgtttgattttacagtaactgatttaaatcctgcaaatgaagctgaggctggattcgtaccatgcgcagaatctggcacaatgacttcatcacgatgaccttcaccattattctcatggtaagctttaaatatcatcaatgcagtccattcaccatgtgcgccagcagctggttgtaatgtcacctcatccataccagtaatttcttttaattcttcttgcaaactataaataatttctaatgaaccttgaacttgatcttcatcttgtaatggatgtgattcactaaatcctggtattctagcaaccttttcattaattttagggttatacttcatcgtacatgaacccaatggataaaatccgttgtctacaccgaaatttttatttgaaagttcagtataatgacgtactaagtctagttcagcaacttcaggaaactccgctttgtttttacgaataaatttatcatctaacaatgactcaacagaatttgttttaatatcactttttggtaatgaatatgcatatctgccttcacgagatctttcaaaaattaatggacttgatttactagtcatttaactcaccagccttttctacaaatgtatcgatttcatcttttgttcttaattcagttacagctattaacatgtgatttttaaagtcgtctgaaacaacacctaaatcaaaaccaccgataatattgtacttcactaattcctcgttaacttgttgaattggtttgtcaaatttgactacaaactcattgaaagatgtaccatctaatacttcaaaaccttttttaataaattgctgtttagcatagttagcatgttctatattttgaactgcaatatcatagataccttgtttaccaagtgctgacattgcaattgatgacgctaaagcatttaatgcttggttagaacaaatattagatgtcgctttatcgcgtcgaatatgttgttcacgtgcttgtaatgttaatacaaagccacgattaccttcatcatcttgtgtttgaccgactaatctacctggcactttacgcattaactttttcgtcgttgcaaaatatccacaatgtggcccaccgaattgagcaggaattccgaatggctgagtatcacctacaacaatatctgcaccaaatgaacctggaggtgtaagtaatcccaatgctaatggatttgcatatacgataaataatgcttttttatcttcaataaagctatgaatcttttcaagatcttcaattgaaccgtaaaagtttggatattgtactgcaacagctgctgtttcatcatccactgctgtttctaattttttcaaatctgtaacagtgccatctaaatcgatttccactacttcgaattccttacgcgtcttagcataagtatgaagtacttgtaatgcttgataatgtaaaccttttgagactacaattttatttttctttgtttgactaaatgctaagatacatgcttcagcaaagccagtcatcccatcatacatagaagaatttgctacatccatatctgttaattcacaaattaaagtttggaactcaaaaatggcttgtaattcaccttgagaaatttccggttgatatggcgtatatgctgtgtaaaattctgatcttgaaatcatagcatccacaactgatggcgcgtaatgatcataaacaccagcacccaaaaatgatgtatgcgtttctttagtgatattcttgcttgcaatgcgatttaatcttctaagtaacgttgtttccgcttcgccttcagcaatatttaaatctctatttaataaaatgtcacttggtacatcaccgaataattctcctatagattttgcaccaattgtttgtaacatttcttgcttgtctttttcagttaaaggtatataacgatgactcacaatgcacacccctttttaattatttatcaatttgatttttcttaacaattttcgcttttaattgacgcttacgaacttgaacaagcaactctctacccatttcaaactcatctctttttatcattgcaagtgcaattgattttcctgatgatggagactgagttcctgaagttacttctccaataatatttccatctaaatccataacttcataaccagttcttgcaattcctttttcaagtaattctaatcccactgttcttcttggtgcaccattttctttttgatcttttaatacagatttaccaataaaatcagcatcaattaatggtttacttgcaaaagcgataccaccttcatatggtgtaattgattcagttaaatcttgtccatgtaatggcaatccagcctctaatcttaatgtatcacgagcgcctaacccacatggcataacattatactctaataaaccatcccaaattttttcagtatcatcgatattacaataaatttcaaacccatcttcacctgtgtaacctgactgagataaaatgacgtttgctccaaataatttgacaccctgtttaaattcaaacattttcatttcagttacatcttcatcaactaattgattaattaaatctctagcttttggtccttgtattgctaattgaccatattggtttgatacattttgtacttcaacatcaaatttctctttgtgttttaaaatccaattaaaatctttttcagtattagcagcattaacaactaataaataattgtcgtcagctaatttatatattactaaatcatcaataataccgccttcttcattacataaagcagtatataatgcttttgaagtagttaaattatcagtatcatttgataataaatattgcacaaactgactagcatctttacctgttacttcaatttcacccatatgactaacatcaaacaggccaatttcgtatcgaacagcattatgctcctctttaatacttgaaaattgaacaggcatcgcccatcctccgaattccacaatttttgcacctctatcaacataattttgatataaaggtgtttgttttaaatcacttgacattgaaatacccccttaaaattataaaaacaggatagcaatcgctaccctgtttataaatcaccaattcaggaacgcgttacagtattatccttttgcctgagagtttcgtaataaattacttgcaccttcggcgatagagtcttaacgctctattctctctaatactgatcactcgcttttattaaatttagcaattcataatatatttctgaaattgatagcaaatgactatcaaatttcttgaatgcgatttcattatatcttaaattccgcgagcaatacaagtcatttaactgcttgattgtcttattatttgcattaggtcgatgtgggtcatcattgattcgactatatataatatcaatattacaatctaaccaaataatgtttttttgatttttcaaaaaattaaatgcctcttcactctcaataataccaccaccagtagcaattatatctgcagtgttaatacattcttgcaaacatgtgaactctaaattcctgaaatattgttcaccatgtttactaaatatttctggtattgttaacttatacttctcttcgatatatgaatctatatcaataaatgataaattttgctcatctgcaacgtatttaccaatcgtagatttaccggtacccatgaaaccaattaaaattattggtgatttatcatgattcatgcgttttcccttctttcaataacaaaacaatcttatagttatagtcagtttcaatattatataatgtctttaattttaaactatattgactgatataaaaagtgaaaatagaaaaataaattgctgttagcatcaataagaacggcgtaacatatcctttttctttatataaatcaaaattaataaattatttcacatcctttttaatagtactcatttaaatactagtaagttatacataaatagttttagtctgcacatttgtaccgactttaactgttatcgttattttaataatggatttatagtagatatttgcagtaaatgctgtaacattattaatcattgttatatttcctctgtcatttacaactttaataattttattatttattaatttgtattcgatcatttcttcacctttctgtaaaatgatacgctgttgcctaatttcaatatcgtttttatctacacctttaaaatcctctagaatatctcttgagaaaaattcgaaatctacagttgttaattccctactttcaattagaaaagttttgctaagtctaattaagtctggaacaattagtaaaattatacttataaccatcatcgctactaacatttcaataagcgaaaaagctttgacattaatactgtatacatgtcttttgataagaagtggtattttttgaaatagcacaaatttgttggtcactttgcttaatatcatatttccctatagttacccccttcttaagttcttctttattaattttagatacagtcgtcaaaattactttagaagcatcaattgattgtagtttatggtttatactcgcttgcatttgattcatcattggtatcaatagtaatgtaatcaatccaattagcaaaaatccagccatactatctattaagaatgatcctttacacttatagcttttcataacgaattcttcctttttcaatatggaatattattctataaattgaattgttattgtcaattgttatgctaccaaatttattgatattcccttttttatcaaaggcaataatatcaacttttgcaacattaattattttgcctacttttaattttagaaatcgtattttattattctctattactttaatagtgtcactgttttcataaaatctaacattgatatatccttgatttgctatagcttgcgacttaatataattcaattcagtaataaaagaaatgatatttgcctcatcatctattactctaagattgcttaatcctttagatgtcattgtcaaaagtagaaatatactgattaacatcattaccacaagcatctcaatcatagtaaatgctgactgctttctaatttgcaactgcttctccattactaattgttattgtctctcctgatttacatgtcttttgtgcttcttttataaaaccatctgcaattaagtcttcaatagacgatggatttctattatgtttcaatgcatacgcttcaatttgactattaaccatttttacctgtgcattacaacctgttgattgtatgtgagcagtttgtttagcaatatttggaatgattaaaattaataataaactgatgattaataacactaatagcatctctatcaatgtaaacgcttgagttttcttaagaaatttaaacatatattaacctccattattttatactttgcatcatttgaaacattggtaacataattactaaataaattgcgacaataaataaacctaaaatcaaaaataaaataggctgtaaaaactgagtctgttttatcgctttatcttctatttgttttactaatatttgcgaatataactttagttctacttctagcttccctctcttttcaccttgtagcacaaacttaattaattgaggcttaaagcattttagtttttctaaaatttgaggcaaaccatatcccatttctgaataagttaataagtatttacctagaaactgtctaaatggatcactactatggttaatataaacgtctactattgattgaagtgtaataccatttttataaaacaacactaattcattagttacaaaataagttttaaataattggaaatagcctgatattagcggtagtttcatcacaaagtttatcttattgagcatatttaaattgttataaattaatttcataataatagccaacatagatactattatgagcattactacaattatagtaggtaagctggtaatgaaaaaagacaatgttttttgaaaagaagatagttgaatattcatagaagtatataattgttgaaactgtggaattactgtgaggtttaatataataatcatagcaataaagatagaaactagtattaaggggtattgcagtgtctttaacaatcgttgttctgactttctattcactttcatataatttacagtttcttctagaacgtctataatattgccaaatctttctgccaaatatacttgcatgacgatagtatcgctataacctatcagtgataatatttgattgcatggtgcaccatttgaaatttcacttagaatggtggtacctaattgcttatttttatatgtcatttgaagatttaaaaattgaaaactttgatacagagtgaaaccatatttcaacaaattacataaatttgaaagtaaatcgatttgttgggccttacttaattgtcgcttctcaaaatgtagtttaaatgtatttatccattgtagtttcacaaatgacacctgcttttgtcatatcatcaagtttatcttctaagttcttaaatgatgatggtaatgaatgattatgggaaaagaaatatcggagttgttgctgagatagaatttcgcatactaattgtcgctgttgcttaatagtagttacaagtcgttggtttataattaagttagttgcctgtatcaattcttgtacagaaatgcccatttctaatagccttaaaatagcacctttacaatcagttgcatgcaatgtagtcagaacaaggtgaccacttaaactagcctgtataacacacttggcaacatctttatctctgatttcacctattaaaataacatcaggatcacatcttaaaatagctttaaacgaatttacatagttaatgccagctttatcattcacattaatttggacgataccaggaatttgcatctctacaggatcctctatagaaattacatttaaattcaaggctttattcgcgtatgagaccatttgatacattaatgtactctttcctgaaccagttggcccactaaacaatagtaatccttgtttcttattcatgaggtgtttaaaatcattgaatttataagttgatttctgttgttgaaaaaattgaggtacaattctgataacacaactttcttggccaagtgacaatggtaaagttgatattctcaaaaaatatattttattgaaatggtaactatatcgaccgctctgtgcgacttgctgtgtagaaacatcaagcccagcttgaaacttcatataaactaataacttttgataaatgctattcccaatttgttcatactgctccaagttatcattaattctaaatttaatacttacttcatttttaactggaataaaatgtacatcactcgctttcatttctatcgctttattaattatttcttgaaatagaatcttcaaaaaaacacctcctacatataatcacgtaggaggtgtttttattacttcaatttaaccgtgtaaaaatggatttaattgttcatcatcaaccgtcgtatatggaccatgtccagggaataaaggtaaatcgccttctaattcaaatattttatcttgaatagaatcaactagcgtttcataatcacctttatataaatctgtacgtccgattccattattaaataatgtatctccaacaactgcgaattcatcgaacacatatgttaaacttcctggtgaatgtccaggtgtgtgtaacacattaaacttaaatccttctatttctgtgctaccttcgtttaacttttcaggagttaccttacttgtaataattggtaatccatattgcttaaatttatctgccccatttttaacgggatcttttagaaaatcaaactctgcttcatgcatataaaccgggacatcgaatcgatcaactatatcatcgactgctccgatatgatcaaagtgtgcatgtgttaataaaatagcttttaacggtttatttatttggtttaattttttaataattttttcactttcacctgaagggtcaatcagaataacagctttgtcattttcgatgaaatacgtattagtatcaactaagcctaaagttaagcttgaaatcctcataggttttcaccactattttctaaatgtttttgtactgatgttagtttatcattcatttttctagatttgtctcgtcggtcatcaatacggatatttgtacaaactctacttaaacctttatcaaaaggtaattcatgtatcacttgcacaacttctaatacatcgcttaattcaccttcaattagagtattcattggtgttaattgaaaatcaattttacccattgctttatattcttgaagttttttctgaatatctgcaatatatttactaacactcggaccttccgttccaactggaataacaaccacatcaacaatagccattattttaccccctctttatctaatacataggtcttgattaatcctgctgctcctgtaatacctgcatcattacctaatttcgcttgtacaatttcagtttcaaattgagcaggtgcaaatgttaaattatgatattctgttttaatattttcaattaaaataggtcctgcagtagacattcctccacctagaacgatatatttcggattacttgtaacactaataatactacataaatatccaatatagtttgcaaccttttcagtaatgaaaatacagaattggtcaccagcttttgccgcatcaaaaacagcttttgctgtaaccttattttctttaatcaattctaatatagaagatctaaacgtcaacttcggatagtagaagttaactaagttaacaacgcctgtcgctgaagcaactgtttcaatacatccagaacgaccacaattacatttaaatcgttgatcgaagtctgctctaaaatgacctatttctgcgccagagccattatgaccatgtacgatttcaccatttgaaataattcctccacctagacctgtaccaagtgtgatggcaacaacatcatcggcaccttcaccagcacctttgtgtttctcccctaaagcagctatgttagcatcattatctacatacactggacaatcaacgaattgttcaaaaatctcacgtacattaactttttctggccaatataagtttactgctccatttactgtacctttttcaaagtcaacaggacctggtacaccaatacctacgccaagtacatttgaaaaattataattattttcatttactttttcaacaaacgaatcataaattcctttcaaaagtgtatatcctgtactatcagatgtatcagtgtgaatagaccatttatgtaattgttctaattcaggtgtgaaaatacctaatttacaagtcgtcccgcctacatcagctgctaaaataatttttgtcatttctgttcattccttctctgattaattatcaacgtacatttcaaatattcttccttagataacagttcatattgatacaatgatgaaatctcctgttgaatcatttcgtacatatcttctggatttttaaaatatattagaaatccgtaacttttcaataactgttgtacatcataaaagttatttatttttcgactcatttgatttagtcaactctttttctaagttaatataatctgtatttttagggtcagcatttaatgctttacgcacatattttaatgctttttcatcatcatttaatgaacgatttgctatcgctaactcaaaatttaataaacctgatttaggaaacattctaagtcctcgctcccattctgtcataccttcagacttagaattgatagtagccataatcataccacttaaataatatgtttgatcatcggcataatttttatttattgtctgcttcacaatattttgagcattatcataattaccactagtcatatcatctttgatcaatttattataaatattatcttctttaattgtaaaaattctaatttgaagtgcaataaatataacaagcataccaattagtaaaatccaaaaaatattacgattcactttatagtaatagccaattaaagttattaataaaccaccaatgaatcctccaatatgcgccacaatatttatatttgacataaacagagaaacaccaactaatatcactaatgcaattaataactgtcctaacatttttttgttaaatgtttttgaaacatacatcatcgcaaaaattgatccaatcagaccaaatatagcaccactagccccaactgaaattgtagtcgtattaaatgatagtgatacaaagtttccaaacaaccctgcaataaagtatacagttaacatccgccatgaaccaataattgcttcgactattttaccaaaaataaataatgaaagcatattcataagtatatgttcaaaactaaaatgtaaaaacatcgatgtaacaattcgataccattcaccatgtacgacattaaaatgcactaacccgccaacatctaataattttacatccgaaaaattatttaaatataaaatcatacataaccatattaagacatttacaaatattattgtgtatgttgccggtgaaaatttctgcatatatttatctaaaaagttatcggttaatactttgcgtttatagaacatatatgtctttttatcattatcttctgaaataagtctagccaaaaatatattcggcatttgctttatcaaatcttttgtgtgtcttataacattgaatttaattctaattggcgaaacttcatttaattgttcttctgaaaattccgattctgtaaaataataaaattcaaaactttgtggttcgaaagaaataaaatttgctatttcatctttgtgttcaagcactttcgctttgtcaaaacgtatttcttgggtagacttgatatgttgtttaaaaatgactacttgtttttttcttttatgggctaaccaaatttcttggtcatctttttccctactgacaatatcaaaattcaagtacctaatccaataatatattgttttccaaaattgtttgtctatgttcatttagtcctccactatgctgattgatatataatcaatttatcgactggttgatcgaatgattccggttcaaatgatgttatttgaaaatcgtataataagcttattgtctttgtctgataattagctaaaaacctgtcgtaatagccaccaccatacccaattctatatccatcgtcttgaaatccaacaccaggaacaacaattaaatctaggttattcgttgtttcaccttttgaagttggatagtaaatccccttattatcgacatcaatatctttgagattaaatatttctttaaaagtcatttgatgatttaaataatccattttcggtacaaaaatacgtttatgatccattaaggcttgttcaataatagaaaaagtatctacttcatgattaaaagaaagaactagcgcaattgcgtttgcttctttgtattcttcagttgcaaaaaattgatttcttaaccatgtgtctgcttttcgcttttcagctttattaaaattcttcattttatgtaaaatgtattttctaatctcatttttagtcacattatcacccactttattcaattctattatatcgttaataacaatacatgtcattatgttgtcatgatgaattatgcgacaattctaaaatttattatttcaattgaaaatcttttatcatttcatacgtgtgcataattaaaaaggtgaaacctcttattttgagatttcaccttttttattgttaatttaaatttaattttaatgattattttgtttcacggtgtaaagtttgtttgttttcacgtgaacagaatttcttcatttcaacacgttctggattatttcttttgttcttagttgtaatgtagtttctgtcaccacattccgtacaagctaaagttacgtttacgcgcatggttattcctccttatcatttctaaatacgactttattattataccaacatctataatatttgcaaagttaaaattttacaaccatgcgctacacaatcgtcaggttaaattttatttgtctttgtctttatttttatcatctttacctaactgcttaaagtagtaattaattacatctctacctaagtctccacctgttaaccatggtggtggtacaggctgatttgtatatacaattgaaaacgctaattttggatcatcaattggcgcgtatcctatataagtagagttaactcttggctctccgttttggaacacttcagcggtacccgttttaccagcagtaggtactactgtatctttaaaactaacatatccagtaccatctttatcattaaatgccattttgaatccttcttgaatttgtttgatttctttttcagtattattaaccttgttcaagacagtgccattaattttcttcttgagtggaccaacctcatctttattagttgattcatgaatcgttaatccaatgtgtggctgtattctataaccatcattcgctatagttgaaacatattgtgataattgtaatggtgtataggtatcatattgaccaattgataaatctagataattacctggattatttgttaatggttcgatttgacctcttgtttcatttggtaaatctatccctgttttcacacctaagcctacttgatttaatcctcttcttagcttttgggcaggtgaacttatgtctgaaggtaaagccataccagaataataagggtctcccgctaattttaatgctgttttaaacatatatacgtttgatgaatgcatcaaagcttgcttatcattaatagatacatgcccgtttttattgaagtatgatcgttttgtcaaaccaccttggaaatgtaatggttcatcgaccattgtttctccaactttgatagctttattctgataaccggctaataatgttccaccttttacagaagatccaaccgcaaattgagaagtaaacgtaccaatgtcataatcagtcattttaccactcttattaatctgctttccggcaagcgcaagaatgtctccatttttaggattttgtacaaccatcatagcattatccatatcttttgcaccttggctgcgaagcttcttaatttgtttatctaataatgcttctacttctttttgaagatctatatcgatcgttaatttcaaatcttgaccgcgagcgccaggatttaacacttctgaagatgtaactttaccagatttgtccgttgtgtatttcatttctttcttcttaccacgcaatacatcttcatattgatattctaggtaagattttccaacacgatcattgcgtgaatatcctttggataagtaatgttctgtcaattcttttggaataccttcagcaggtgtcgatacatctccgaatatacctcttaaagtatcgccatatggatattttctatcccaatccatagacgtgttaacacctggtaatttggaaagttgctgagaaactgctgcatactctttttcactgacatcttcattttttatcatttgtggatctaaaactgttcctgcattcatctctcgaaaaatagctaaaacttgtaaatctttagaagacaattcatctaattgtgattttccgattttcgataacagttgtttatcatattgatcttgtttaatacttccatctgctaacatagcttgttcttttgtcatcattgcttgtgcttttttaggatgcaactgaatccagaaatctttcttatcacgttctgtgatcttcttagtatccatcttgattagctttgataacttttcagccgtatccaacatttccgattgtgttgtttttcgacccctagtatatgtaatagccattttagaagcattatcaactaaaactttcccatttctgtctaaaatacgacctcttggcacagactcattcactgtaatgttttcatcattttttataatttgtttataatgtgagccttgtgcgatttgtaaataacctaaacgtagtactagtactgcaaaaataaatacaatcacaccaaatataaagttaattctcttgttaattgtattttgaacgatttcatcatttgatttttcttttagtctttttaacaaaactacctacctctattcaaagtctttcactttaaatcatatatgaatttagaaattatttctatctttttgacaaaaaaataacggtctcatttaagagaccgaacaagtaatcatactttattttgttgcattatataattcgtcaactttttcccagttaactacattccaaaatgcgccaatgtagtcagggcgtttgttttgatattttaggtaataagcgtgttcccatacgtctaaacctaaaataggtgttttaccctcagttaatggattatcttggtttggtgtagtcacaatttctaactggccattgtttacgactaaccaagcccaacctgaaccaaagcgtgcagctgctttgtcagcaaattcttttttaaattcttctaaagaaccccattgttctttaattttttctactacagtacctttttcttctgagtttggtgaaagtaactcccagaataatgaatggtttaaatgtccaccgccattattacgtacagcagtttggatgttagctggtacactgtctaaattagcaacaatttcttcaatagatttagattctaaatctgtaccttctactgcagcatttaatttcgtaacataagtgttatgatgtctgtcatggtgaatttccatagtttctttgtcaaaatgtggttctaatgcatcaaatgcgtatggtaattttggtaattcaaaagccataaataatcatcctcctaaaatgtctgtaagtaaataataacaagcagtgactggttcaacaaagaatttgcttaaattctactacttattattttctctactcatttaatataactcaaatcaaaaataattaaacattttgtatataaaaagttaacagatttgccataaaatcatacgaacggagtatgaaatgaacctttatcttctataatttaaaaaatgagatttatgcatacatctgaccaaatgtgcataaatctcatttctttatattaatcttggcaagactcacatacaccataaacttcaagtttgtgtttgtgaatattaacaccaggtagtgataattttatctgatctattggacaataatctattacctttgtatctccacacttttcacagataaaatgatgatgatgatggtttgtacaagcgattctaaacttcatttcaccatcaagttctgtattttcaataatccctaaatctttaaataagtgcaggtttctatatattgtgtcgaatgaaattccaggataattttcatccataacttgttgtatatactttgcgtttatatacttatcttcttcgacaaaaatatctaacatatctttacgtttatctgtatattttaaaccgttctcttttaaaattttaatagcatcatttgtattcattgatattagctccctttttaaacttcattcgcattttctgataagccattgtaatcataagtaaaataacaagtagaactacaattacaccacccggagaaatgtccatatagaaagctaggactaagcctaatattactgataattcacctaaaaatacacttagtaatatcaattgcttaaaactttttgttattcgcatacttattgcaattggtaacgtgattaacgcacttactaacagtatccctacaacacgcattgaggcagaaataaccatcgctacaataacaataaataaaaattgaatccatttaggaatgccaatgactttactatattcctcatcaaatgacaatataaataattctttataaaacaatgtaataaacagaacaactatgatggcaatgacaataatcgttgttaaatcacttatattcactgcgcttattgagccaaatagcaatccaacaatttcttgattgagcccatcagctaatgaaatgaagattgcactcaaggcgataccagcactcattataattggaatagcaatttcttggtaagcagtgtatgacgttcttaatttttcaattagaagcgcacctactattgcgaataagattccaaaccacattggattaataaatactagtgttggcataatagtaagtaaaaacataccgaaggatataccacctaaagttacatgacttagagcatcagctataagtgatagtcgtctaacaacgataaaagcaccgattagaggcgcaataaaacctatcaagataccactaattaaagagtacctcataaaatcaaaattcaataatgcatctatcaattgtgacacgcctttccattttaaataaactcaaatctttattaattacaacattctcgattatgctgatgatcgacaaaacgtacaggatgtccataaatttttgaaatttcaacttcatcaagtgatttaaactcatcagttgtaccatggaaatgcaaatgcttatttaaacatgctacttcagtagcagtatctgctacaacaccgatatcatgagtaactaagataatggtgataccttcttgttttaattgatctaaagtattataaaattcacttacatgttttgcatcaataccattcgttggttcatcaagtactaatactgcaggttctgaaatcaatgctcgagcaatcattacacgttgttgttgaccacctgataattctgctatatttttatgaattaaatcacttatattcagtctttctagtactttaatcactttttcattatctttgctattaaatgtttggaaaagacgttttgtctttgttaatccgcttaaaacaacttctttaacacttgctgggaaacctgaattaaaggcatttgctttttgtgatacatagcttaatttaattgatgttttcttatttttaaaatcaataccttcaacaaaaatctcaccactttgtaaaggtaataaccctagaatcaacttcaataatgttgatttaccagcaccatttggtccaacaattgctaaaaattcacctttatttattttaatgtttatattttctaacacttttttatgatcatagtagtaattgacatttttcaattcaaagactggtgtcatcgtattctcacctcgcattcaactatacaactcctagtaacatatgtaaacagtaatgtttacgactcaaaattagacaaaataaagagatatgcccccttcaagttttatttatcgcatttcttgaagagagcattatcattttattgttgcataaccttattttttaattctgggtcaaattgctgttgttttaacatttcaatttcaagtttatatggcggttttttatttttcttatcttcaccaacataaggtgtttctaagattttcggaatatctttaaaactatcatgatgcacaatgtaatttaatgcatcaaaaccaatgtaaccgaagccaatattttcatgtcggtctttttgagcgccacggtcatttttagaatcattgacatgaacaactttgattctgtcgactccaataattttatcaaattcatttaatacgccatcaaagtcctctttcacattatatccagcatcatgcgtatgacatgtatcaaaacatactgataaacgttcgttattatgaactccatcaataatacgtgctaactcttcaaacgagcgaccaatctctgtacctttacctgccatcgtttcaagcgcaatacgtacattattgtcattcgttaaaacttcatttaatccttcaataatcttattaattccggcatcaacaccagctccaacatgcgcacctggatgtaatacaatatctttagcgcctatagcttgcgttctttcaatttcttgttgcaagaaatctacaccaagattaaacgtttctggtttggttgtatttgcaatattaatgatgtatggtgcatgaacaacaatattagataagccatatttttccatcacttcatgacctttagttatatttaaatcttcaatacttttacggcgcgtgttttgaggtgcaccagtataaatcataaatgttgtttcaccatattcatacgcttctatagcagaaccttctaacatctttttaccactcattgaaacatgtgatcctaataacataaaacacacctaaccttttttgttttgcttacgtttttgtctattttgctgcttactaaattgtttacgctcttgacgtttcattttttcaacttcttgtttaaatttcttcttataacctggtttaactttgtttttaattttacttcgaactttgttcttcacttgattagttaaatggtcatctttgcgcattcttgcttgacgctgattgtgcgctttaacttcttttaactcaccatctttaatatcaacagtattgaatacaaaaccgcgatcttctattaatgaaatattgtgttcttcatcaggactataaagcgtaattgctacacctttataattcccacgaccagttcgtccaactctatgcgtaaagaagtcaatatcatttggcacatcaaaattgatgacatgactaacaccttcaatatcaataccacgagatgctaaatcgctggcaataacgtattggaattctaaattacgtatacgtttcatttgttgtttacgttcacgtggcgttaaaccaccatgaatcataccaactttaataccagcttcatttagtgaacgtgctaaatcatttgcattatctctactattacagaaaataatacataagtatggatttagtatatcaattaaatttaaagttttttcaactttagctgcacctttagtaggtattaaaaagaattcgatgttctttttattttgttttttactgtcgacagctacatattctggatgacttaaatatttatttaaaaatggttgtaactgttgtggaattgtagcactaaacaccgcaatatttgcattatcttccaatcttgcagcaatgtaatctacatcttcaattaatcctaagtcaatcataagatccgcttcatcaataactaaatatgatgctaagtgcacatgtaaatgtcccgttttagctaagtcattaattctagtaggggtgcctataatcaattgtggttgtgcattacaacgttgtctatctttctctatatctgtaccaccaataaaaactttaactgaaacaccagctttaaattggcttaaatggttcgctgcatcgtatagttgttgtgcaagttctcttgttggtgcaactacgattgcttgtggttcttttatttcactatcaattaactgcattaatggtaataaaaatgcatgagatttccctgtacccgtttgagattgaccaattaaatttgttctctttagtattcttggaataattcgattctgaatttcagttggtttttcaaaattaaggtctttcacagcgtcaattaaactagattctagattaaattgttcgaatggatgttttgccatgatttggcctccttatatgttcatctttactattataaagtataaatgtgctattttaaataaaaatattaaaacctcaaaatttcaaaatttagaaatcccgagattttagtttaaatatattgaaatggatctgtattaattgtagatgcttcaacatctatatttattttttctgtattgaaccaattcattagtaacgtttttaaaccttctttcatcacatattcgctgtaatgattaatatcaattaaattcacaccatgaattttagcatctaaggcatcatgatgtttaatatcacctgtaacaaagacatctgcgccttgttggacagcttgatattcatatccaatacctgaaccaccaataattgcaatacgtttaattttctgattagactcaccaacaaaacggacacttgggatatttaatttagatttaatatcagctgcgaaatcttccaatgtcatttgattatccacttctgccataacgccaagtccataaagggatgtttgttttatctcaataaaatcaaataccggtgtttcatatggatggtattgtttaattaattgctcagcccttgacttttgatatgcatctatcataaattcaattttaacttcatctacatattcaattttatcaatttgtcctattgttggattagcttcaccaactggtttgaattgccctcttccttcactttcaaagaaacaatattcataattaccttcttgcgctaatccattttcactaagcttatctttaaatggtccaacattatccttaggtatatatgtttgaactttatagtatacatcttgttgattatttattattgaaatgttcttcaaacccatcgccttcgccaacatcatattgacaccatacggatttacatctaaatttgtatgcatcgctattaaattaatgtcatgttgaattagttttctaatgatcaaaccataaccattagcttttaatgatgttacgcctttaaagattagaggatgatgactaataatagtattataacctttttcgattgcttcatttactacttccaacgtacagtctaatgctgttaaaacaccagtaacttcaacatcttcatcacctattaacaatcctacattatcccaagattcagcagtactaaatggcacatgatgatctaacaatgtcattaaatcagctattttcattactataacaccctttcaattacagcaatttcgtcattaatttgagctaaacgttgatgatgttgttcagtattgagtttcgatttaatatgataaagtgcttctaactctctttgccatttttttataaaatattcatttttgttgttcagcaattttggtccgaatttcaatccatcagatgatagctctattaattgtgtagaatattctgctacaacaatttcataaatatggcctttttcttccattattatttcatcaattatttcataattcaattgttgtaatgtttgtcttaaattttcagtttggatattactttgtaaaatcaaccttggatgttgacttaacttatcttgcccatcttttaaaattttagcaataagtggtccgcccataccacatattgtgatattatcgattacgtcctcaggatgaataacacttaagccatcccctaaacgtacatcaattctatctactaattggtttgcagctacatttttcacagcagcttgaaaagggccttgaataacttctcctgcaataccgtaatcgcataaatggttttgaattgcatagattggcaaataagcatgatctgagccaatatccgcgattgtaccttgttttaaaaatcgacttaccgtcgttaatcggttatttaacgaaatcattttattctcctttatgaaaaaagaggttgaacattattcaatgtaccaacctcactcaagttaaatcttaatctaaaaataaataagcgcttattcatgtcttggtatcaatcattaaaattgatataaattaatccataaagtctttcaaacgtttactacgacttggatgtcttaattttctaagtgcttttgcttcgatttgtcgaatacgttcacgtgtaacaccgaaaactttaccaacttcttcaagtgttcttgttctgccgtcatcaagaccaaatcttaatcgtaatacattttcttctctatcagttaatgtatcaagcacatcttctaattgctcttttaataattcataagcagcatgatctgaaggactttgtgcttcctgatcctcaataaagtctcctaaatgactatcatcttcttcaccaattggtgtttctaatgaaacaggttcttgcgcaatttttaaaatttcacgaactttttctgctggtaaatccatttcttcaccaatttcttctggtgctggatctcgacctaagtcctgtaataattgacgttgaacacgaattaatttattaattgtttctaccatatgcacagggatacgaatcgtacgtgcttggtcagcaattgcacgagtgattgcttgtctaatccaccatgttgcatatgttgaaaacttaaatcctttgttaaagtcaaatttttcaacagctttaataagacccatattaccttcttggattaaatcaaggaataacataccacgacctacgtatcttttagcaatacttacaactaaacgtaagttcgcttctgcaagtcttgattttgctacttcatcaccttgttcaatacgtttggctaattcgatttcttcttgtgcacttaataagttaacacgcccaatttctttaaggtacatacgaactgggtcatttattttaacacctggaggggcactaagatcacttggattcagtttctcgtcagtatctgaactatctttttcattaactagtgaaatatcattatcatttaattgatcaaagaaatcatccatttgatcagagtcgatatcaaaattctgaagtttttcagcaatttcttcatgacttaaatgaccctcttttttacctttttcaattaattgcttcttaacatcttctaatgttaatgtcggatcaattgtttgttttttaattttaactgtgttatcagacatgaaacggcctcccgattttaaatatgaacattcgaaatttattcaatattgctattttaaactaaattcttaattaattcatccatatttttaattttattttacaaattggaactaatcccaatatttatttttcaatattgttgtttaaatgcggtaactatcatttacccttatacattttgacataatcattattcgtattattctttaaaaccacatgctacatgcgttctttattcttagcaacaatttgctgtaaatagtatttttgtaattctacatcgccaatccttgtagcttcccttaatttatgattcaatgactcaattgtttcttgtcctttttcattaataacattgacataatcatcaatttcattttcatatggttcgtcattcaaattatattgttctaagctaattagtgtttctctcaactcatttgaattaacatactgcacagcatcactgatattatattgatcattttccgcataaaaatcatgtaagacttcgaatacatatttaaaatgctgatttgtgaagttatccttatcaacactttcataataatttaaaaatgtatctttatctctcattaaatgttttaaaaatgctcgctccgctttttcttgacggctcaaattgtcaaattgtgccataccaattggctcaggttcaatataaccgccatactcatcataaccgccatactcatcttctggataataattggctggtgcttgattgaattgtatttcgttagctaactgctcaggactaacattgaaaaatggcgcaacatcatttatagccttttgttgcagaattgatgacttcataagtgaaatgtcatgactcagttctttcaaataacgttcatatgaaaggtcattatgtgcaatttcatcttttaatatactcactttataatgtgcaaatgactttttgtcattttttacaaaagcagtaaatgcatcgttgccatacttaccaatgtattcatccggatccatgcctgatggcaattgtataacaaatacatttagcccttgctgtaacaaatgttgacctgttttaagtgttgcttcactacccgcaaaatccccatcaaacattaatgttatatttgatgttaactttcgtataaaagtaatatgttcatctgacaactgtgtccccattgttgcaacaacgtttttcaagccagcagtatcagattttataacatccataaaaccttctagtaatacgatttcatctaattttctaattgatttacgcgctttatctaagttgtataacaactttcttttttgaaagataggtgtttcaggactatttaggtattttggttcttgaccggtatatgttcgacctgaatatccaacaattcttccttgcgcatttttcaaaggaaacataatacgatttcgaaatctatcgtaataactgaaattttcttcgttacgtgataataatccggcttcatatgctaattcaatatcgtaaccctttttttgaagaaaatcatgacaaaaatgtgagctatcgggtgcaaagccaatgcctcgctctttaataagcgcatctgtaaaaccacgttcttgtaagtatgttaatgcttgttcgccttcgactgtctttgttaaagcgtaataataaaattcttgtattaactcatgcatttcaatcatttgtaaatcatcagaagcaatttgaacatttgagttagattgtgttgcctcaatatctacagcaacattaactctatcacctaattctttaaccgcttcaacaaatgatatgtctttaatttcttgagtaaattgaaaaacattgccaccttttttacaaccaaaacaatgacagatttgtttatcttcagaaactgtaaatgaaggtgtcttttcatcatgaaaaggacacaaacctatataattgcgtcctctcttttctagttttacatattcacttaccaagtctaaaatgtcggttttatcttttatttcattaatgatcgattgatctattcgcaaattaaatcacctattaagcattagttatactattatacctaatttttgacaaaaatgaaatcatttcgatttattttgttcaatataatggattatatcgtttgctgtttcttcgattgctttttgagaaacatcaatgacaggacatccaatttcacttacgatttcttcaaagtaattcaattcttcttggattcgagcttctgttgcataacgagctgtgtcacctagtcccaattgttttaatcgctcttttctaatgcgatttaatttttcttcacttattttaagtgcgatacatttcttaggatcaatatcatataagccatctggcggtgtcacttctggtacaatcggtacattcataactttgtaactcttatgcgctaaatactgagataatggtgtctttgaagttctcgaaataccaagtaaaacaatatcagctttaggtaatcctttaggatctttaccatcatcatatttaaccgcaaactctatcgcatcaattttcttgaaatatgcatcatctaatctatgaacgatacctggctcattataaggtttttcttcaaccgatgctgataataaatccattaatggccccatgatatcaacggaattcaattggaattctgctactttctcactcatatattgcttcatttcaggtttaataagtgtataaacaatgatagcatttgtatcttttgcaacttgaatcacttcatcaacatcttcaaaagattcaatatatggatatcttaataattcatttttacattgcttaggattaaattgtgaaatacctgccctagcaactaactctgccgtttcacctatagaatctgaggctacgataattttaattttttccattacttctcacctattctttatataatgctactaataacttagctattgttgttttggaaattcttccaattacttcatacttttgattatctttttttcttacaattggaatcgaatcaatttctttttcaatcattctatctgctgcgtaaatgactaattcgctttcctctaaataagtgacattaggcatgcgtgtcatatttacactgataggtactgtatgaatatctgctccaatcattgaagctcttaataaatcttttcttgaacacacaccaacaaaatcgttatcttcattaataataaataatgtacttacatcttctaaaaaaattgtacaaatagcgtcataaactgttgtattctctcttagcacaacaggttgagacatatagtccttaacctcaaattgtcgaagtttttcattaaaaaatttaccttttgatttacctgaataataatatccaactcggggacgcgcttctaaaaaacctgacattgttaatatcgctaaatctggtctaagcgttgctcttgttaaattcaacttatctgctatttgttcaccagtaatgggtccttgagttttaacaatttcgatgattcgttcttgtctttgactgagttctataggtcttcaccccttttttattcacttattattataccgatatttctttcatgtcacaaacacattaattttacttgcctttaaataatctatcaattagaataaacgtacagcgagttaaggatagtgtaagcttaacaataagattggcgcaacgaatcattttaaaataaaagcgagtgactacactaatttgggtggaaccgcgggttaaatacgtaacttattttgtattatatacaatttaaaatattaactcgtcccatggaagtaaagcatatttactatgctgttattttccatggggcgttttcatgtatgaggagaggtaattatggcaaaagatatggatacaattgtttcattagcaaaacacagaggttttgtgttccctggtagtgatatttacggtggtttatcaaacacatgggattatggtcctttaggtgttgaattaaagaataatgttaaaaaagcttggtggcaaaaattcattacacaatcaccgtttaacgttggtatcgacgctgcaatcttaatgaatccaaaagtatgggaagcttcaggacacttaaacaacttcaacgacccaatgattgataataaagatagtaaaattcgatatcgcgctgataaattaattgaagattatatgcaagatgttaaaggtgatgaaaacttcattgccgatggtttaagttttgaacaaatgaaaaaaattattgacgatgaaggtattgtttgtcctgtaagtaaaactgctaactggactgaaattcgccaattcaatttaatgtttaaaacattccaaggtgtaactgaagattctacaaatgaaattttcttacgtcctgaaacagcacaaggtatttttgtaaactataaaaacgtgcaacgttcaatgcgtaaaaaattaccatttggtatcggtcaaattggtaaatcattccgtaatgaaatcactccaggtaacttcattttcagaacaagagaatttgaacaaatggaacttgaattcttctgtaaacctggagaagaaatcgaatggcaaaattattggaaaacttttgcaagtgactggttaacaagcttaaatatgagcagtgaaaatatgcgtttacgtgatcatgatgaagatgaattatctcattactcaaatgcaacaactgatattgaatataaattcccatttggttggggtgagttatggggtatcgcaagtcgtacagacttcgacttacgtaaacatgctgaacactctggtgaagatttcagataccatgatccagaaacgaatgaaaaatatattccatattgtatcgagccatcacttggtgcagatcgtgtaacattagctttcttatgtgatgcatatgatgaagaaggcgttgaaggtagtaaagatgcacgtacagttttacacttccatcctgcattagcaccatataaagcagcgattttacctttaagtaagaaattatctggcgaagcgattaagatttttgagcaattaagttctaaattctcaatcgatttcgatgaatcacaatctatcggtaaaagataccgtcgtcaagatgaaatcggtacaccttattgtgtaacattcgactttgattcattagaagataatcaagttacagtacgtgacagagattcaatggaacaagttcgtatgccaatctcagagttagaagctttcttaactgaaaaaacaaaattctaattaaaaagactttccaccatatgtggtggctatataatttataaaaagagatactggttagtaaaattgccagtatctcttttctattcaaaaaggtattcaaataaacacatctatgtggctacttgaataccttttattattttatgttattgttccaatctttttaattggttgattagtttctgacttttaaaaaacatacctgcatattcacgatataacattaaaatgatatctgacatttcatcaataatttcttgatggatattcaatgaattcattttatctatcggtaatttttgtaatacatctaataaatatagtgttttattcgataatataactgcatgtacatctttagaagcctcttgccttgaaatcgcaccgtcaaacttaaaactataacctattaaatctgcttgtgtgtcattaccactcacagcacagcgattaaatgatgcagtaaaaccaaatcgtttcatgcactttaacataactacgactgacattaactgtgcagatgtacctgattctattttttcaagaacaaattgtaataattgatagttatatggtgcaatgtcaccttcatccattgaacgctcaatagtttcagctgccagggacgcataactgcttacgtaaaggtccatttgtaatttataatgttgactaataacatctacagaatttaacgttcccatacctcgccactgattgtaaataaacaaaccataaacaaacaattgcgtttgcgcttgtaaacccgtcttaacttttttagcacgccttgccataagtggtacttttgcaccgtgctcatttaaaatcgtgataattttatcagattcaccataatcaactgctttgatgataatccctttttggcgcattaacaattatcttcaccacttttaagattaatcttggtcttcaacataaccaatttggcgaataaagttaactttgtttcgccagtctctttgaactttgacccataattctaagtaaactttagagcctagaagcatttctatatcacgtctcgcacgttttcctacttcttttaactttttaccgccttttccaatgacaattcctttttgcgaatctctttcaacatatatagttgcttcgatatgaacacgatcttcgctttctttaaccatacggtccacattaacaccaatcgcatgagggatttcttcacttgtaagatgaaggattttttcacgaatgatttcacccactacaaattgttcaggatggtctgaaatttgatcatctggataatatttaggtccttcgggtaaatacgtctttaaaacatcaataaaatgatctacatttagcccttctaatgctgaaataggtacaatctctgtaaagtccatataactttgatattcttcaatctttggcattaattcatctggatgcactaaatctattttatttaatactaaaaatactggtgtcttaacatttttcaacatttctataatatattcatcgcctcgtccagtttcctcattggcattaaccataaacatgattgcatctatctcagataatgtatttttagcgactttcatcatatagtcacctaatttgtgtttaggtttatgaatacctggcgtatcaatgaatataatttgcgcgtcatctcttgtcataacaccttgaattttatttctagttgtttgagctttatcggacatgattgctattttatggccgatcactctattaacaaatgttgacttccctacatttggtctacctataattgaaacaaatcctgatttatgttctgtcatttattctaaatcctttcctgaaaatccaaatggtagtaactctgcgactgtcatcataaccatatctcctttatgatttgtcatatacacaggcatatcatcatcacataattcctttaaaacttgacgacatgcaccacaaggtgatgacggtttatctgcatctacggttacagttattgattcaaaatcacctggtctgtatccttgagaaattgccgataccaaactagctcgttcagcacatatcgataatggataagaagcattttctacattggtaccataaaaagttctaccgtctttcgtttttaaataagcccctactttaaattgactgtatggcgaatatgattcttgttgtgcttttctaacttcttgaaaataatgaggttgataactcatatatgcctccctaaaataacgctataaaatgtggtaaaaatactattaaacctataataaatgctaatattgaaactataagtacactaaaagccgctatatcttttgcgtatttagctaaatcatgatattcaacggtcactaaatcgacaacatattcaatagcagtgtttaaagcttcaacagtgagaactaatgcaatagcaatgagtataaatatccactcaatacgattaatatttagtacgagaccaaagacaatagcaacaatcattgcaaacacatgtaaaagaaatttatagtctttttgaattaagattttcagcccatcaagtgcatatttaaaccttttcataattagcctcgtgttaatccatatgcgtttaatattgtatcttgtcgaccaaacatttccttttcatccgcttcagtcatatgatcataacctaatagatgcaaaaatccatgtaatgctaaaaatcctaattctcgttcaaaagaatgtccgtaattgtttgcttgttcttgcgctacatccgtacagataattatatcccctaaaacacgtggtatatcaagaccactaaaatcaatctctggctcatcttcttctaaagcaaatgagattacatctgtaactttatctttatctctatatgttcgattaatttcttgtatttcttgtttatctacaaatgtaacagaaagctcagcatcgtcttctatatgctcttcttttttagcaaattctaataaatcttcaatttgtttataccacgcatctttaactaagcctgtgtgatcgctaaaatctatcgtaaacatttaattctctccttcataatgttcaatgatcttacttaccaatggatgtcttactacatcgctctgatctaatttcaatatacttatacctttaacgttgtgtaacctactgaccgcttccttaagtccacttttaacacctttaggtaaatcgatttgagtttggtcaccagtaactaccatttttgagccaaaacctagtcttgttaaaaacattttcatttgcgcatgtgtcgtattctgcgcctcatcaagaattacaaatgcatcttctaatgttcgtccgcgcatatatgcaagtggcgctatttcgataatgcctctttcaataaatcgctctgtttgttcacgcccaagaacagtatatagaccatcatataaaggtcttaaatatggatctaccttttctttcaaatctcctggtaaaaatccaagtgactctcctgcttcaacagcaggtcttgttaatacaatacgtttaacagcacctttacggagttgctttgctgcataaactacagctaagaatgtcttacctgtaccagcaggacctataccaaatactaaatcattatttttcatggcattaacatatatacgttgccccatcgttttcgcacgaatcgtcttaccaaatgcatctttagttatctcttcatcatataaatctaacagatgttgaattgtgttattatgcgccattttaatagctgcttcaacatctttaattgtaatattattacctaaatcaataaccttcagcaaattgattaatactgattccgctttttctacgttttctatttttgtacctttaacggcaacttcttgtcctcttgcatggatgacaacatcgaaactctcttcaattgcttttaaatgttcatcattatttccaattaaagcttgagattggttcatatcgtctatttgtataattccaggcatacacgcgctccttttcatatatcatttatattcattctatgatgctttaatatctacttaattatatcatgcaattgattgatttaaacatctttgcattgacttactcatttttctttaatttaaaataatcatttatacttttcaccttgtcataaaagcagattcaattttagactaatcaattttttgttgtaatttaaataactaatatttctcgaaagattctctttgtttttcaatttttcttaacgtaaaaaaacaagcaactaccattacgatagtgcttgttttcaaaaaattttataattgttttggtttagctaaaatttctgaccatatcataccattgattacttcatctttatcaaattggaacgctgatttagtcaaatctttttcgacattttgagaattaagcaactgctttaatttcaaacgttttgtacgttcagataagtatttatcctcaataatatctctagcacgtttttccattttagcaatttgcttttctttttctctatcaatgtcagtacgaatcgttttaatatcatctctaagtgatttttctaattgacgtctaatttcgtcagaattatcttgtctagaaggtctatgtttctgctccaccggttctgctttaggcactgtaattggtttctctgtcatcggttttgtttctggttgttttttaggtgccataggttctacaacaggtttcgatttaggctcttcctttggaagttcatcgaataaaggtggtaacgtatcatcatattttcgtttcgatgatttcttttcttcttcatttaattcttcacttatttctttaaacgttcgctcaatttcttcaaaaaagccacctttttttggttcattatcggtagatgttttttgaggtggcttttgattttgtctatctttatgactattttcgcgcatagtagtaatgatagaaatgatcactgatatgacaaaaattagaataccgacactcatttaatcacctctcgacttaatgttcaggtgactcatcatcactttgatcagttcgtttattaattgcatttctcatgcctgtatcggcttcgatatttttcaaattataataatctttaacactgatattacctgaacgtaatgcttcagccatagctaatggtacttcagattcggcttcaactactttagcatgcatttcttgtacacgcgctttcatttcttgctcagttgctacagccatagctctacgttcttcagcttttgcttgtgcaatatttttgtctgctaatgcttgttcagtttgtaagtctgcaccaatatttttactaatatcaacgtcagcaatatcaattgataaaatttcaaatgcagtacctgaatctaaacctttgcttaaaactgttttagaaatattatctgggttttcaagtacttctgtatgatgcttactagaaccaattgttgaaacgataccttcaccaacacgtgcgatgattgtttcttcacctgcaccaccaacaagtcgagcaatattagctctaactgtgatacgagctttggctttcacttcaataccgttcattgctacacctgcgataaatggtgtttcaatgactttaggattaacagacatttgaaccgcttctaatacgtcacgtcctgcaaggtcaattgcagcagcacgttcgaaaggaagatcaatgtcagcacgttgtgcagcaatattagcgtcaacaactctgtcaacatttcctcctgctagataatgcgattctaattggtttgttgttaatgctagtcctgctttgtgcgctttaattaatggcgctataacttttcttggagatacacgacgtaaacgcataccaaccaatgtacctataccaacatgaacgccagctgctaacgctgaaatccacaaaccaatcggtacaaatgagaataaaataagtaatgcaactattataataactgctattacgataaaacttaaactaaacatggtatcgctccttttaattaatctacttccctcacaactactcttgttccttcaacttcaaggattttcaccgttttattgcgtaaaataaagttgccatctgaaacagcatcaatacgttcattttcacaaaaaataatccctgcaggtcgaagatctgtaactgtttgagcagtctttcctacgaggtgcgagcggttatcatgagaattgtaacctgactcagaattagttgaatcttttaagataactttatccaaaaacggaatctttctgttgaaaatcttcactaatatcacccattctacaatcgttaaaatcaaggcaacgataacattcgcaagcataaatagcaaattatcaccgagcgttgttatgcttatagttatcagtatcataccaataataccaattactgcaccaactacaaataattcaattacaactaatataacgccaattgagaatattaagatagaatgcatattgacatttccttggattagaaatcccaaaaataaaataagtaatgataatgtggcgataataccagctgcattgatttttttagagtaaagttgatatacaaatcctaagaatgtcaaacaggttaatattaacgtaaaaataggttgaataattatattactaacttgttcaacccaagtatctccagccgttgattccaagatagttgtcatttgtaaaaaattattataactcacaatttcacctcgccctcacattaattatacatgaaattgaatatactttatagttataagaacctatagaatatcaatttgattatttataaactatataactttttttaattaaaaattgacaacaaaaaaacatcacaagttattgtcagacactaacttgtgatgtttgttttatataattaatattcgtgttgagggagtcaacagaggtattaattatttgaatttacgtttacgtgcagcttctgatttctttttacgttttacgcttggtttttcgtaaaattcacgtttacgtacttcttggattgttccacttttagaaactgaacgtttaaatctacgtaacgcatcttcaagtgattcatttttacgtactactgttttagacatctgtatttccctccctccaaatatcaacggaactttatagtcaattgcacagtaaaactatgcatttataagtataatatatctgtaatttatggtcaattagtaaattgttttttatttgaaacatatttcacatcaaaatcacaaagacttttagattttgttctaaaaatctcttaataatttatttaatgagaagagttgcttatatagtaaattgtgaagccgttaaaacaacgttacaaaacctatatctttaatacggaaccttatggtatgaatcaaggaatacttaaactaaaacttctctatcagatttatttgttgcgaaatcaacaactttaattgcttgcccttcatttaatggataatttgcttgcgtaattttaacttttacaatttgacctatgagtgattcgtcaccttcaaattgtactttcatataattatctgcatatccaactaatgtgccttctgtgtcaccctgttcctcaggaattacttcaagcacatcttgatcaaatttagacgcatataactttccgagttgattgcttagcgtaattaacttatgcacccgttcatttttaatttcttcatcaatttggtcatccattcttgcagctggcgtgccaattctaggagaataagggaaaacatgcagttcagagaacttatgctttacgataaaatcatatgtttcttggaactctgcttcagtttcacctgggaaaccaacaattacatcactcgtaactgccaagtctggtaaagctttatgcaattttgttaatcgttctgaaaatctatccattgtatacttacgtctcatacgttttaatactgtatctgaaccagattgtaatggaatatgcaaatgacgcacaacttttgttgaacgttctaaaacgtcaattacttcatctgtaagttgacttgcttcaattgaagaaattcgaattcgttctaatccattaatcgtttcaagatcacgtaataattgggccaagttataatcttttaaatcttgaccatatccacctgtatgaattcctgtcaatacaatttccttatatcctgaattcactagttgcgtcgcttgttcaactactttttccggatctcttgaacgcattaagccacgagcccatggaataatacagaatgtgcagaagttgttacaaccttcttgaatttttaatgacgcacgtgttctatctgtaaaatatgggacatctaattcttcatatttacgatttttcatgatatttccaacaccattaattggttggcgttctttacggaattcatcaatgtaacctaatagtttatgtctatcttgtgtaccaactactacatcgacaccaggaatttccataatttcagctgatgaagtttgcgcataacaacctgttacacagattacagcatcaggattttgtcttattgcacgtctaattatttgacgactttttttatcacctgtattcgttactgtacaagtattaataacaaatacatcagcattcgcttcaaagtcaacgcgctcatagtttgcttctttaaataattgccagattgcttcagtttcataatggtttactttacaacctaatgtgtgaaacgcaactgttgacataaatattcaccccattaattctttttcataacttattgcacttaacgcatacaatggcgcagtttctgcccgtaaaattctcggtccaagaccaacaactgtactagtattactaaataatgaaatttcattttctgacaaaccaccctcaggaccaaaaatcatcaacactttatcctgagccttgaattgttgtaaagtttgcttgaaattgcttaactcaccatcttttgcttcctcttcatatgcaataagaatatagtcataattatcaatagtatcacaaattaattttaaattcgactcgaattgaatagatggaatcactaaacgatagctttgttcagcagcttctttaattattttttgccaacgctctatctttttggcaacttttgcctcgtttaatttaacaattgaacgttccatgctcacagctataaatgatgaagcacccaattcagtagctttttgtagcaaccactcatatttgtcagctttgattagtccactgcaaatcgtaacatcaactggcaattctgtattaatattttgtttttcttttaaatcaactgcaattttatcacttgttatgtcagcaatttcacataaataaactgtttgatcattaaaagttaaaataattttactaccaacatcatatctcattacatttgttatatgatgaatatcttctttttttgtaataaaaaaacgctgacttacatcagcgttttggtctatgaaataacgttgcacattattcactcactttctggccaacaagacaaacccaaccgttgtcatgttgttctgaaataattttaaaacctacacgctccatatgtgactgtataccttcatacttctcttttataataccagaagtaataaaataaccgccttcatttagagtattataagcatcttcaatcatttcatcaataatatgcgctaaaatatttgctattacaatatcaaatttttctgtttcgtctttcaataagttacctggaacagcttcaattaacgtttcacaatgatttcttctgaagttttctttagctacattcactgccatttcatcaatatccaacgctttaatacgttttacaccgattagatgacttgcaatacttaatatacctgagccagtaccaacatcaattactgaatgctgtggcaatacatatgtttctattgccttcaaacacatacttgtagtcggatgatcacctgttccaaaagccatacctgggtcgagctcaatgcaaagctcttcatccgcttctttagcatatgtttcccaactaggaactattgtgaacttcttcgacgctcggaatggatggaaatagtttttccattcattttcccaatccgtctctgcaataatttgctcactgaattgaacgttatgttgatcaagttcatctaaatttaataactcatctttaatttgctgtcgcaacttatcatcataagtcatttcattaaaataggctttcaatcttactcccttatctggataatcctcttttttcaaagcgtaaatttcaccgtatttatcttctggttggttaattaaatcatctgaatcttctatcacgacaccatttgatccatgattttcaagtatattggtagccaattctactgcttcatgattaataataattgaaagctctgtccagttcatactttattctcccttaaagaatctttttgctctatctttaaaattcgaaggttgttcattaatttcttcaccatttaattgggcaaattctttcattagttctttttgtctatctgttaatttagtaggcgttactactttaatatcaacatataaatctccgtatccatagccatgaacattttttatacccttttcttttaagcggaattgcttacctgtttgtgtaccagcagggattgttaacataacttcataatttaatgttggtatttttatttcatcgcctaaagctgcttgtgggaagctaacatttaatttgtaataaatatcatcaccatcacgtttaaatgtttcagatggtttaactctaaatactacgtataaatcaccagcaggtcctccattcacgcctggagagccttcaccagctaatctaatttgttgttcattgtcgacaccttcaggtactttcacttctaatttaactgttttattttcagtaccttttccgtgacattttggacaagcttcttcaaattcttgaccacttccattacatttaggacaaacttgttcagtacgaactctacctaaaattgtgttttgttctacagctacatgaccagcgccattacagtaactacaagtctttttacttgttccaggctttgcaccatcaccatgacatgtttcgcatgttacatctttacggattgaaatttcttttgttgtaccaaataccgcttcttcaaatgtcaatgtcattgtatactgaagatcatcacctttttgcggtgcatttggatctctttgtctgccgccaccgaagaaagagctaaagatatcttcaaaaccgccgccaccgaagccgctaaaaccaccaaagtcagagccattgaatccttgtccaccaaaaccttgtggcccgtcatgtccaaattgatcatagcttgcgcgtttattatcatcacttaaaacttcataggcttcagaaatttctttaaacttttcatctgcaccttcttctttgttaatatctggatgatattttttcgaaagctttcgatacgcttttttgatttcatcttttgaagcatctttactaatgcctaaaacttcataatagtctcttttggccacagctatctctccttttcttaattaacttatatagtttaacgtaatatgtcatactatccaaataaaaagccaaagccaatgttctattgactttgacttttcagatcatgacaacattctaattgtattgtttaattattttttgtcgtcgtcttttacttctttaaattcagcatcttctacagtactatcgttgttttgaccagcatttgcaccttgtgcttgttgttgctgttgagccgcttgctcatatacttttgctgataattcttgaatcactttttcaagttcttcttttttagatttaatatcttctatatcttgaccttctaaagcagttttaagagcgtcttttttctcttcagcagattttttatcttcttcaccaatattttcgcctaaatcagttaaagttttttcaacttggaatactagactgtcagcttcgtttcttaagtctacttcttcacgacgttttttatctgcttcagcgttaacttcagcatcttttaccatacggtcgatttcttcgtctgataatgaagaacttgattgaattgtaattctttgttctttatttgtacctaagtcttttgcagttacatttacaataccgtttttatcgatatcaaacgttacttcaatttgaggtttaccacgttcagctggtggaatatcagtcaattggaatctaccaagtgttttattatccgcagccattggacgttcaccttgtaatacgtgtacatctactgatggttgattatctactgctgttgaatagatttgagatttagatgtaggaatcgtagtgttacgttcaattaacgtattcatacgtccacctaaaatttcaatacctaaagatagtggtgttacgtctaataatactacgtctttaacgtcacctgtgataacgccaccttggattgcagctcccattgctactacttcgtccgggtttactcctttgttaggttctttaccgatttcttttttgacagcttcttgtactgctggaatacgagttgatccaccaactaagataacttcatcgatatctgagtttgttaagccagcgtctttcattgcttggcgtgtaggttccattgttcttctaattaatgaatctgataattcctcaaatttagaacgagttaagtttacttctaagtgtaatggaccgttttcaccagctgagataaatggtaatgagatttgagtttgtgatacacctgataagtcttttttagctttttcagcagcatctttcaaacgttgtaatgccattttatcttgagataagtctacgccattttcttttttgaattctgcaactaggtagtcaataattacttggtcaaaatcatcaccgccaagtttgttgtcaccggctgttgatagtacttcgaatacaccatcacctaattctaggatagatacgtcaaatgtaccgccacctaagtcaaaaacaagaactttttcatctttatcagttttgtctaaaccatatgctaatgctgcagctgttggttcattaatgatacgctcaacttctaaaccagcaattttaccagcatctttagttgcttgacgttcagcgtcgttaaagtatgcaggtactgtaattacagctttgtcaactttctcacctaaatagctttcagctgtattttttaagttttgtaaaatcatagctgagatttcttgtggtgtgtatgatttaccttcaatatctactttataatcagtacccatatgacgtttaatagattgaacagtgtttgggtttgtaatagcttgacgtttagctacttcaccaacttgagtttctccatttttgaaagctacaacagatggtgttgtacgtgaaccttcagggttttgaattacttttggctcatcgccttctaatactgttacacatgaatttgttgtacctaagtctataccaataattttactcataataaaattcctccatttaatcattaaattaatttaattttaaacaatgtcttttcgccaaatttaagttattggtttactttgaccattgatggtcttaatactctatctttaagcttgtatcctttttgtagttcttgagtgatttcgccagattcaaaatcagggttatcatcttgaactacagcttggtgaatatttggatcaaatgcttcaccttcagttttaataacttcaagaccattatcttttagtgcgttaatcaaactttcatgcaccatttgtacacctttttgaagagatttaaaagtctcatcatcaccttcaatttgaagtgcacgttctatattgtctattgctggtaaaatatctgttaacacacgttgtgcttgatatgttttgtttatttcattttctttttgaattctacgcttataattttcaaactcagcgtagagccttaaatatttctcttcgttttcatctgctaattgttgaagttcattaattttttgatcttttggatctatttcttcaataacattctcgtcagacgtttcttctattgcttcatcttgtaaatgacctttactttcttcagcttgttcaactgaatcatcaatattttgtttgacgttagtttcttcaactgttgattcagtgtttttttcaactgattcgtctttatttgtcattttctgtcctccaatactttctaatccatcattaccaaattctatttaataattgaatgacattttgataatgcatagctgtaggtccaatcacagcgatttgaccttttaacgtttcatcaaaatgatattgacttgttacaattgaaatatcacttaagctgtcatcaatttcattaccaatttttacattaatatttggtgaagatatatcttgtaataattctgcaattctatttgattctatatattgtagaatgggctgaattgaagatacattactttcattcaatgcatcaataagtttaacctttccacccatataaatgctattactttgattagaaatatgattattcatcgtatttaacaatttattgataaaaatttcttcctgctctgattgaacaaaagagacaatatcatcttgtaaattctgattaaactcagttagtttgtttgtaacaaaatttgatattgtatttagtttgtcattattaaacggtatgtctgaagcaagatgtacatgctcaacatgacctgatgaaaatacgataaccattataactaaattaggattagcacgaatcaagtgtacattattgataatatcttgtttatgattaggatgaacaactaaagttgtatattgagatatatttgataattcatctgcaaaatatgtcaatgctgatgatacatcatattgattctcaactaacaattgatttaatcgtcttaatttatttgttttttgatgagatgtttgttcaagtaaacgattgacataatacctaaaacctaattgtgatggcgaacgccctgaagaactatgtgtcttttcgatatagtttaaatcttcaagctgtttcatctcatttctaattgtagcaggactaacattcaagttatgtcgctcaattagtgttttagaaccaacgggttgtccaaaatcaacataatcctcaacaattgcgtttaatatactcaattgcctatctgtaatcatgttttcacctcattagcactcacttatctcaagtgctaattataatttatcaaattggtcaaagtaagtcaatgttaaagactcgaaatttcaatttttttaatcatttattaggaaagcttcaaaaacctcattaccaatgactttccctcgatttgtaagtgcaatcgcatcgttcttttctacaattaatttcttctcttttaaattatttattgtttgaccaaagacactttcaattgattggtcaaacttctttttgaaccttctactactcacaccttcatttaaacgcaacccaagaaacatttcttcttccattctctcagtcaaagaaggtttatttgatactaaaattgctttactttctttatttatagctttgatataatgattcactggattgatattcgtataacgaacaccatctacataaccacttgcacctgctccaaatccataatattcctcattaaaccagtaaaccttattatgttccgattcatggccatctaatgcaaaattagaaatttcgtattgatggaaaggagattgttctatcttagacatcagcaactgatacatgtcagcacctaaatcctcattaggaagtttgagcaaaccttttctatacatattataaaattgggttttaggttcaagtattaagccgtaactcgaaatatgttgaatatccatatctaaagctagatctaaactttgttcaaaatcttcaatcgtctgcttcggtaaatgatacattaaatctaaactgattgatttaatacctgcgtttttagcatttaacaccgaagtgtaaatatcttcagtattgtgcgttctacctaaaacagacaataactccggtttgaatgtttgaacgcccattgaaattctgtttactccatatttctctaatagttggactttctctttagttaactcatcaggatttgcttcaaatgtgtactcgcctgtgattgtaaacgtatcacgtattgctctaagtaatctttccaactgatcaatagaaagggccgttggagtgccgccacctacatacatggtccttaagttcctatattttgctgtagacatttctgttataagtgcatctaagtactcatctacaggttgattctgtataaaatatttattgaaatcacaatatgtacatattcttacacaaaatggaatatgtatatatgcactttgtaccgtcattttaatgccccgcttctcagactgtttatccaatcggctatatcctgttggactatctgcaattattcttacttttaactttaacgtttaatcaatgattgtctaatatatcgattcattttgatatttataaatgtttagagggagtgagatagaaataataaagaaccactaatgatttattatgtagtggctcttacacattagccagatgtaatatgtccttaaaaataaaattacatgagtaaaactcatgcataagggagtgggacagaaatgatattttcgcaaaatttatttcgttgtcccaccccaacttgcattgtctgtagaaattgggaatccaatttctctgtgttggggccccaccccaacttgcacattattgtaagctgacttttcgtcagcttctatgttggggcccacaccccaacctgcattgcctgtagaatttcttttcgaaattctctgtgttggggccccattgttataagctcattttaactctgtcgatgactgccaatataacattgtaaagcccaggacgttaatttatcctaggctccctctttttagttattaaactttattcattgtaaattgttaatagattttttaaaaaattattcgtcatccattttcaatacagccaagaaagcatcctgtggaatttcaacattaccaactgctttcatcttagctttacctgctttttgtttttcaagtaatttacgtttacggcttatgtcaccgccataacatttagctaaaacgtttttacccattgatttaatatttgtacgtgctacaattttttgtcctattgcagcctgtacaggtacttcaaattgctgtcttggaattaacgttttaagtttttcaactaatgctttaccacgttcatatgcaaaatctctatgaactatgaagcttagagcatccactttatcaccgtttaataaaatatccatcttcactaaattactttctttattttcgatgaactcataatcaaatgatgcatatcctttggtattagatttaagttgatcgaagaaatcaaatacaacttcagctaaaggtaattcataaacaatatttacacgaatatcatctaaatagtccatatttataaattgtccacgtttacgttgacataattccattactgcacctacatagtcatttggaaccatcatagttgcacgaacatatggctcaaatattttatcaattttatcacgatctggcatttgtgctgggttatcaaccgtcacttctgaaccgtcccttaaaatacattgataaattacagatggtgctgttgcaattaattcaatgccaaattctctttcaattctttcttgaattatttccatgtgtaacatacctaagaaaccagttctataaccaaaacctaatgcttgtgatgattcaggctcgaattctaatgatgcatcattcaattgtaatttttctaatgcttctcttaaatcattataatttttgttatctattgggaacagtccgcaatataccattggattcattttcttataaccttgcagtggttctgatgcaggtctactagctaatgtgattgtgtcaccaaccctagaatcatcaacatttttaatacttgcaataatataaccaacatcaccaactgttaattcatcaacaggaagctgcttaggtgtattaattccaacttctgttacttcgaactctttaccagtggccatcattcgaattttatctccggctttaacaacaccgtctacaattcttatcgatgaaattacccctctatatggatcatactcagaatcaaatattaacgcttttagtggtgcttctgggtcgccatctggagctggcacaacttcaactattttctctagtatctcttcaattccaatgttagatttagcacttgctaaaacaacatcgtcttggtctaaacctatcatatcttcaatttcttgtttcacgcgttcaggttctgcagcaggtaaatcaattttgttaataacaggcaataactctaactcattatctaatgccaaataaacatttgctaatgtttgtgcttcgataccttgagccgcatctactactaaaatcgcaccctcacaagctgccaaagaacgtgacacttcatatgtaaaatcgacgtgtccaggcgtatcgattaaatggaatgtataagtatttccatctttagcttcgtactttaaacgtactgcgtttaatttgattgtaataccacgttctctttctaaatccattgaatctagtaactgatcttgcatatctcttgtttcaactgatttggtattttctaaaattctatcagccaatgtagattttccgtggtcaatatgtgctataatcgagaaattccttatattctctcttctttttaagcgttgctcattatccattttatccttctcactttcataaaataaacccgtattatctttcgcatctttgatataataacgtttttaataggtaaatgcaaacgccataatcttggatgaactttgaaattataacaatctttatttaaatacatacttgcgatatgttaatatgttaattacgtacttataattataaaacgtattgattgtgtttccaacacaatttattaaatctgcaaaattttaagctaaccccatcaaataaatgattgcacaacggttagacttttgttaaaatatttcttgttgtaatcaaataaaattttgataagatgaactcacttttaggaggtgacagaaatggcaaatatcaaatctgcaattaaacgtgtaaaaacaactgaaaaagctgaagcacgcaacatttcacaaaagagtgcaatgcgtacagcagttaaaaacgctaaaacagctgtttcaaataacgctgataataaaaatgaattagtaagcttagcagttaagttagtagacaaagctgctcaaagtaatttaatacattcaaacaaagctgaccgtattaaatcacaattaatgactgcaaataaataatctttttaaataaaagttcaagcgcatgcttgaacttttattttttataaagatagaatgaataattccagtattaactgtttatccatatatgatgatttaagtttataatcagtttccgcacaagcatctataatattcaataattcatcaagttgataatgtcttacttgtcctaacgctaattttactctgtatggatgtactcctattgttttagcaatttgctgtccactatatcctttttgactcagaatcttacattgataaaataatcggtaattacttgtaattagtgcaagtaatttaattggttcttctttcatagttattaaatcttttactaaatgaattgcttgttctttctttcttttctgaatgtattcagtcagtaaaaatacattttgctctaaacttctattaataatttggttaacatcctgcttattaattgttggtctatcgcctaaaaataaaatcaacttttctatctcttgtgagacaatattaaagttaatacctgtcaactcaataaataaatctaatgcatctcttttgatatctttgaaattctcatttaatttactttgaatccatttttttatttcttcttcagacatttgctctatttttttaagccttgcatgcttttttagagttttagttaacttttttctttcatcaagtttattttgatatatctcaaagacaatcaaattttcgccatcatatttttcaataaattctattaattgatctacattatgagccatatcttttggcgctttttcacctgtaaatatatatgcatttttaaccaaaattgcttttttatctgaaaagaaaggcaatgttaatgtttcttcaacaattggtgcaatctctgtttcgtataaattatatttcacaaagttaaagtcatctctatcacttttcaaaaattgtgatatgatttctgcactttgtttttcaaccaattcaggcacatctccataaatagctacaatattgtcgctcattcattacaccctttcattcgtttgacacatcaatagattatatcatgtttctgtatctataaaccacttgcatttccataagagcttgaatcaacttttaaattatcatctaagtcaattgtaacttgaccgttttgttgactattgtaaatgcgactgcgaatcctttgcaatcgtttaacaacttctatattaggaagatgatacatattgttcttcccagaagaaatcaaacttattttaggcttaatcatctctataaattctttagaactacttgtattgctcccatgatgtcctacttttaaaatatcaatctccggcaagttatatttttttagtagtaaagattcattatttttactagcatcgcccattaataaaacttttttattttgatatgtaatcatagtaataatcgaatactcatttttatctcggctatttggaataaaactatcaaaaaatagaaaactactatctccaagtttaaaactactaacttgtcttacatccataagtttaatgttgtacttatggcttaatttcgataataacatcaatgtattactactatatcccttattgtatatcactatatgtttaattttaatatgactaataatatattccacttcaccaatatggtcattgtgtggatgtgttaaaattagatactctaattcatttatccctctttcatttagcgttggtaaaatatgatatttagaaattgaataactaggttgtttagtatcatcaatcactttcccacctgtatcaatcaagacattttggttcttaccgccttcatataaaatactgtctccctgccccacatttaacattgtaattttgtgatgtgaatttgttggaaacgttattaataatgtcagaataattatagtccaaaacgtaaccaatatatatttacgtttagccaataaccaaaatatgtaataaacagaaattataaatactataaatatccaatcattaaacttgggaacagaaaaatgtgattgcttgattcttgtgaataggtctagtaaccagtcatgaaaattaaaacttaggtcaaccaagtaatttagcggcgttaatcccacaataaaatgacttgtaataaagaataaaatagatagcggaaacaatataatcgaatagtacggtacaaaaatcaaattagataaaaatcccacccattgaagttgatgaaagcttggaatggcaacgataaatgaagctaattgtgcaataaacgtaattatgaataatgattgtaactttgacaattgctgtaaaaaaggaaaaagtagcataataaaaaatgaaatgatgaatgaaaattgaaatccaatatcataaacaactagtggatttaaaataaacataattataaatgcaaatgctaatagctgaataccctttattttaatttgcttagtaataaccagtacaagagttgtcattattatagctcttacagcactaggtgcataatttgtgtattgagcaaataaagctaatacaatgattgtaattcctttaatgacaaataaaggtgaatttaatcgttttaaaggttggtaaattaaaaatacaattgcagctatatgcgagccactaactgccagcaaatgatatatacctatctctttaacacgttccttaaattgctcattaacttcttttacgtcaccagtaatcaatgccataatacgatccggaaacttaatacccgaatcataaattcgattcattataaactgtttatgtttctcaattaaattagaccggttcgattctaggcagctttgtacaactatactttgtaatttaagagttacaaacttattgtcattaactttgaattgtcctttaacaatacaattacgactttcaattttctttaaatcaaaattctttttatctgttaaaaagaaaggatatatttcattttttaaactcaacctacctttatatgtgtcactaccttgacgttgaatttggattacttgagcacgctcattaaactgagaattacgttcaatataattgatataattaaatattgcttgttgtgaataatgtaaataccatgaggagaaaatgattaaaaagagagaaataggggcataaacgattttatttttacgataagtaatatacaaaagtaaaatgaaaagaaatgtagagagcactttgctagaattccaaagcactcctacaatcattgataacgcgacatacagcaaaacattaacctttagtcagatatttagcaacatattctggtgaaaatggaatttttttaaattcaataccagattgtttgagtaatttagttgcatattcatggttatgataatcttctgcatagtagatacgctttatacctgcttgaataattgactttgtacaatttaggcatggaaaatgagtaacatagattgttgcaccttcagtagatacaccttgttttgcacattgtaataaagcattcatttctgcatgtatcgttctgatacaatgtccatcttcaattaaacatccttcatctatacaatgcacctcgccagctacagagccattataaccaccagcaataatacgattatccttaacaatcgttgcacctacagataatctttgacaagttgaacgtaatgctagcaaatgactttgtgccataaaatattcttcccatttgattctttccaagatgttcaccttccatacttaaaatttagtaacattttctaataatataagattaatcacaaaaaataaaatttgcaattaaaataatccattatgtcgtgaaataagatttcagtttatcaaaagttttacttccaaaaccttttacttttttcaaatcgtcaatttcttgaaatgcaccttgttggttgcgatattcaacaattgcattagctttagcttgcccaactccaggaacagacatcaattctgatacagatgccgtatttaaatttactttagtattatttgtgttcccatttttttcgtgcacactgtttacttcaatttgtggttcaacattcttttgtcctttatgaggtatgaaaatcattttttgatctgttaatttttcagacaaattaatttgacttacatctgcatcctccaataattgtgctttatcaagtaaatcaactactctatccttagatgtcattttataaacattaggatgtttaacagcaccttttacatcgacatatacaggacccttatttttggaattatctccatctttgacctggacatcttctactttggacaaactactattttcactagtgctttgtttcagagcagtatctttattttcaaaatttcttgaagtataatcatcttgtctccagaatataaaaccaattaataccataattaaaacaacagcacttagaatatataacttccattgagttaaaaaatctttatagcgtaataaaaattgatacaataaaaccactcctcaactttatacacgtctgagcgagtggttttacttttattttttcgcaatgaaaaacaatctttctgcatcttcattatgttcatctatattaaaatcagtaaatgtttcaacatgtttaaaaccaacttgagctaaccaagacaaatatgtcttttcatcaaatgttctctgaaaatgagactcatcaaatcttgaatatgtttcatcttcatgtcgaatgaaaaatgtcatatcatgataaacacttaaaggtaaatctccttgcacagcatcccatgctaaaaaaatgtcccctttatcatcaatataactttgattattaaacaaagtcatcattttataaacagtatgtacatcaaaaataaatacacctgaatcagtcagatgatgataaacattgatgaatgtttcaatcactgcagtttcatcttgcaaataatttagagagtcacaaaaaatagtgatgatatcaaattgttgttgcaaatcaaaagatgtcatatctccttcaagccaatttacatttgctgatttttgagctgcaacagtcaacatatcaacacttaaatccataccagtaacattacctaaagcttctaattgaactgttaaactaccagtaccgcatccaatatctaaaatatttgattcatctttgcagtgattttttacaatttcaaaccatttttcatatggttgatcttgagtcaattgatcgtacactaggctcatttctgcatattgcgacataattaatacgcaacctgactatatgattctaatggtgcatcttgatataacttttcaatattataataatttctttcgtctttatggaaaacatgtaccacaacatcagctaagtcaattaatatccaacgcgcttcattgtatccttccatacgttttacttctatattttgttcattggctacttctttcaccgctctagcaatcgcttgaacttgtcgttcattatttccgtgcgttacaacaaaataatctgtcatatcgctgatacctttcatttctaaagaaatcgtatcttcgccttttttattgtcaattgcatccacagcaattgctaataattcttgtgaattcatttaatcatcctttattctttcgtcactatagttataataatttaaacagtcaatcgtcttattatataccgtaatatctttctgtattaaaaatagtactgtgcgtttagaaatttcataaattgtcttatctaaactaccttgattgtatgccatatctcgaatatcatcaactcctgggattgttcttccaggttcgatgtaatctgcaataaaaatcagtttttcagtttctgtcatttgttgacgtccagtagtatggtatttgatagccattaatacttcctcatcattgataccatattcatgttccatgattgctgcacacacagggccatgcaatatttcactaccataactcagtagatcattacctaattcgtattgtcgaacaatttgatacattttacctaaatcatcatatttacagaaatcatgtaatacacctgctaattctactttactagtgtctccatcataaatttctgccaatttaatcgctgtttctgcaactcttaaagaatgattataacgtttctctggcagtttctcttttgcaagccgttttgctttttcaatgttcatataatccttcccccttaatatagttttcaacggatttaggaacaagaacttggatagatttcccttcactaactctttgtcgaatcattgtcgaacttatatctaccctaggtatctgaattgcaatcatagcattttcaacattttgactatttttgtctcgatttacaactacaaaagtaaccatttcttttaagtattcaatttgataccatttctctagttggttatactgatccgtcccaataacaaagtacaactcactgtctttgtgttgctccttgaatgccttgatcgtgtcataggtataactttgaccaccacgtttaatttcatcgtcacaaatatctccaaaaccaagctcgtcgataatcatctgtatcattgttaatctgtgctgaacgtctataaaatcatggtgctttttcaatggagacataaaactaggtaagaaataaaattcatctggctgtaattcatgaaatacttcgctagctactatcatatgtgcagtatggatagggttaaactgaccgccgtaaagtactatctttttcattattatggcaattcaatttctttattatctttagattctctataaatcactatcatagatccaatcacttgcactaattcactatgcgtagcttcgcttaatgtttcagctaattcttttttatcatcaaagttattttgtagtacatgtactttaatcaattctctgttttctaacgtatcatctatttgtttaatcatattttcgttgataccgccttttccaatttgaaaaatcggatcaatattgtgtgctaaacttcttaagtatcttttttgtttgccagtaagcatatgttattctccttttaattgttgtaaaactgctgttttcatagaattaatatcagcatctttattagtccaaattttaaagctttccgcaccttggtaaacaaacatatctaagccattataaatatggtttcccttgcgctctgcttcctctaaaataggtgttttatacggtatataaacaatatcactcattaaagtattgggagaaagatgttttaaattaataatactttcgttatttccagccatacccgctggtgttgtattaataacgatatcgaattcagctaaatacttttcagcatctgccaatgaaatttggtttatatttaaattccaagattcaaaacgagccatcgttctattcgcaacagttaatttgggctttacaaattttgctaattcataagcaatacctttacttgcaccacctgcgcccaaaattaaaatgtatgcattttctaaatctggataaacgctgtgcaatcctttaacataaccaataccatctgtattataccctatccacttgccatcttttatcaaaacagtgttaactgcacctgcattaatcgcttgttcatcaacataatctaaatacggtatgatacgttctttatgaggaattgtgatattaaagccatctaattcttttttcgaaataatttctttaattaaatgaaaatcttcaattggaatatttaaagcttcataagtatcatctaatcctaaagaattaaaatttgctctatgcataacgggcgacaaggaatgtgaaataggatttccgataactgcaaatttcattttttaaatcaccttataaaatagaatttcttaatacaacatcaacatttttaggaacacgaacgattactttagctcctggtcctatagttataaagcctagaccagagatcataacatcacgtttctctttgcctgtttcaagtctaacagcctttacctcattaagatcaaaattttgtggatttccaggtggcgttaataaatcgccaagttgattacgccataaatcattagccttctccgttttagtacgatgtatattcaagtcattagaaaagaaacaaactaacggacgtttaccacctgatacataatctatgcgcgctagaccgccgaagaataatgtctgcgcctcatttaattgatatacgcgttgttttatttctttcttaggcataataattttcaattctttttcactaactaaatgcgtcatttgatgatcttgaataatacctggtgtatcatacataaatgatgattcatctaaaggaatatctatcatatctaaagttgttccagggaatcttgaagttgttactacatctttttcaccaacactagcttcaatcagtttattaatcaatgtagatttcccaacattcgttgtccctacaatatacacatcttcattttctcgaatattcgcaattgatgataataagtcgtctatgccccagcctttttcagctgaaattaatacgacatcgtcagcttccaaaccatattttcttgctgttcgttttaaccattctttaactcgacgtttattaatttgtttcggcaataaatccaatttatttgctgctaaaatgatttttttgtttccgacaatacgtttaactgcattaataaatgatccttcaaagtcaaatacatccacgacattgacgacaataccctttttatccgcaagtcctgataataattttaaaaagtcttcactttctaatcctacatcttgaacttcgttataatttttcaagcggaaacaacgtctgcaaatcacgtcatcacgaaacatattatgctctggtacaaaaccaggtttatttttatcttcagattgaagtggcgcaccacaaccgatacattttaaaatgtcagacaatcaattttcctcccatgtgatataaccttttttactgaaatgacgtaataatcgtctttcaattaatctattaaacttagtaataaagccatcagttcgtttaactggaacaaccataattgtatatagacctcgacgattaccaccaaatacatcagtaagcatttggtcacctataacaacagtttgatctggtctgatattcatcttagttattgctttatcaaacgctttccccattggctttctcgctttaaaaataaaatcgatgtctagatgctgactaaaactagcaacacgagactcattattattagacacgattgtaatagtgattcctttttcattagcttccttaaaccatgctttaacacgttctgtaggttctttaacatcccaacctactagcgtattatctaaatctgtaataatacctttaacgcctttgtccactaacttgtctaaatcaatttgaaatattgattgaacatatgaattcggcataaaaaacttgcgaactaaacccatttaactcacctttacctttttataattgagacactaatgcttcaacagtttgacttgatgatacagctgctttttctaaaaatgcttcgaagctcatttccgcttctccatttgctaagtctgaaactgcacgaactacaacaaatggtacattaaattgataacatgtttgtgcaattgcagttgcttccatttcaaccgccatcgcatttggaaatgcttttttaattttttggcgttgttcaacactaccgataaagctatcaccacttacaattaagcctactttagctgttaattgttgttgttgtacaacttgagatactttttctattaaaggtttacttgattgaaatgctaccggcatctgtggtatttgtccatattcataaccaaatgctgttgcgtctgcatcatgatattttacatcatcacttataagaacgtcacctacatttaaactttcatctaaagctccagcagaacctgtattaataatgacgtccggtttaaacttattaattaataatgtcgtagaaattgcagcattaacttttccaatgccactttgggtaatcactacttctctatcttttaaaatgccagtataaaatttaacatgtgcaactgaaatttcgcttaattgtgttaatttattttttaatattgttacttcttcttccatggcaccaattataccaatcatcttttgattcacctcttttaaaaaatcctagcatttgttattttatcacattttaatcactacaacgacaagtatcatgattttcattactgtataaaacttttgctttatttttataaaaagctctttcaataacttggtatcaaaaataattatttttgaactcataacagtgaattcgatgcttctaatttgtctatttttcaaaaactaatcatatcaattacatcaaccaatcgtgtcaagaaactttattaaataacaggaaaatgatatgtttaaaataataatgatgaaataagaggattttacaatggctgaaaataatcaaaatagtctcgtaacaaagatagctacatacggcagttttattgcaattgcgtcgtttgtcattttatttataagtatatttttaaagttttcatttaatatcgagtttacagcaacaattatgaacatatgtcgctacactctaattctaggatttatacttatgtccttacctgatgttgttgataaaaacatcaagaaaattatattcgatgcatttattatcatcgtctttatcttctttttactatagtagttttattttgtaattacacagttaatcatatttgtttcgtatcgaattcctgtgtgcattaaagataattctaatagaaaatagcagtaagacttttctaagtgttagcatccttactgctgttttcatttgtaacaatataatgtcaggtactttatatttcactgtcaaagattattaatgattaacttaattaaattatgatttgaataaatagatatctaaatgcaatttgtctctattgatagttttattatcagcatacatttttaatacctcataaccatactcaccatttaaattataaaaatcatattctacattttgttcatcatcattatgatatttaacataccctttaacaatgtcgccaccttgttcgtacaacttatacttctcattcaaataatttcttaattgaacatctaattcttgaatggtaacaattttctttttcgtttttactgcagttagttctatttctgtttgatgtccgtcaatccataaattacaaggtatattcttataatcatcttatttattattgtcacttaaagtaacaccaccataactacattgcgttttattggttgctcccccatgacattcatagctatagcttccagcatatatatcgatattcttatttataaatttctttgaaagtgcctcattttcgaattcaactttaaaatcctttttcgaagcaacatttacgaacatgtcatgaaataacaaatcatgctttaacagtctatcgtttgtgtttttattttcaagatcagttggattagcaaatgacaacttagcattatatagacgctttgaatttagtttacttttatgatgtaagtctgaatattcgattgcacttgctgaatttgtaaaaattccttctaacaataatattaaaataaatcctgttaaatatttaacttcaaactcccccaaaacaattattaatttacatttgagagcgagacataaatgataaagaaccgcttatggtttattatgtagtggttcttgagcctacaattttgatttatgtatcacactcataatactttccaatttgaaataccatgttcgcaattattagttgagttatatcaaccaatacagtgtatacttaaaaattccaaaccgtttaacagtatatcagaaaaaatgataatcatttcttttatttttattaaatttcataatgattcatataatattcgcattaaaacatcacaatactgatacacaacaaaaagagcagtacatttgtcatgcaccactctcaacaaatatatctaattatgctttataaatgaatcaccggaaatcaaaatacatcttgcctaatactaacaacatttacagtaatgctattagtcgaaatgtcttttaaaataactgaagtacttctttgaatgagaatatacctgtcaatattgtaacaagtactgcaacgataccaaagatgaacatccaatttgggtgtttataatcaccaacaattgatttctttttacttgcaatcaaaattgcacctaacgtaataggtaaaatccatccatttatcgcgcctgctataattaaaaggctgattggttttccaataaataagaaaatcattgttgaaataacgataaacacaatcacaattaaattacttctttcgttaagtgatttatgaagtgtttttaaaaatgttgcgcttgtgtatgctgagccaattactgatgacatagctgcagcaaataacacaataccaaaaatattctttccaattggtccaattgcgtgttcaaaaactgacgctggtggattttcagaacttagtgtcacacctgttacaacaactcctaataccgctaggaatagtaacgttctcataatacctgtagttaaaataccagcaattgctgattgatttacaaatggtaaatattgcttacctttaatgccagagtctaatatacgatgtgcacctgcaaaggtaatataaccacctacagttccaccaactaacgtaatgatgggcaagactaatttcattggatgttctggcgcaaatgtatgcacaaaagcatcaccataaggtggattagaaacaaacatcacatatgccacaactaaaatcatcacaataccaagaatcattgaaacaacgtccataattttttggccacttttacttacaaagattaatattgcaaagattgcagtaatagctgcgccccattttacatctaatccaaaaattgcatttaaacctaaaccggcaccagcaatattaccaatattaaaagctagaccaccaaatgcaatcaatattgagataacagtaccaagcccaggaacaactttatttgatatttcttgacctcttaaaccagttacaactaatatgcgccatatattaatttgtgcaccaatgtcaatgatgatagacagtaatatggcaaatgcgaaacttgcaaaaaattgtgatgtaaatactgctgtttgcgttaaaaatgctggcccaattgcagaagttgccatcaaaaatacagaacctaataataaccttttatgattttttgtgaattcaaagtcactttcttttttaagctttaaatttctccccatttttttagccccctataaggattgaatatcaatgccttctttcattaaaatttctctaattttcgaaacaaataataatgcatgttctccatcaccatgcacacaaattgtatctgcttgtaacgttacttccttattgttttttgaaataactttattttccttcaccatctttaaaacctgcttaagtgcttcgtcagtatcagtaatcacagcatcactttcttttctactaacgagctgcccatcatcttcgtatcgtctatcagcaaacacttcagaagctgtaattaatccgacattctttgcttctgaaattagatatgaatttgctaatcctactaacactagtgatggatcaaagtcataaacagcttgtgctataacgtttgctatttctctgtcttttgcacccatctgatacaatgcaccatgcggtttaacatgattaattttaacttgatgaatgcgacaaaacccttgtaatgcacctaattgataaatcatcaaattataaatctcgtcgttagagatatctatatttcgtctgccaaagcctttcaaatcaggtaaaccaggatgtgcacctactgcaacattatgtgctttggcaagttttaccgtttcattcattacattttcatcaccagcgtgaaaaccacaagcaacattcgcacttgtaattaacggaataatttgatgatcaccaccaaaggaataatttccaaatgcttcgcctaaatcacaattcaaatcaactcgcattataattccacccctttaacaatttgatgtttttctaaaaatttaatatcaacatcttttgcatctccatcacgatatagtggataatttaaaactgcatataaaaaatcggcagttgtagaaaatccatctatcaccatttcatctaaggtgactttcaacttatcaattgctgaagctctatcatgagattttacaattactttagctactaaagaatcataatatggtgaaacttgataaccgtgatatagtaaagaatcgactcgcacattaaagccttgaggtaaatgtaacgctgtcactttacctggtgttggttgaaatttcttttcaggattttcggcatttattctcgcttctatcacatgaccattaaattgaatatcgctttgtgaaaaaggtaaatgattatgttccaataaatacagttgtgctgcaaccaaatcacgttctgctcgcatctctgtaacagtatgttcaacttgtattcgagcattcatttcaataaagtaatgtgcggtatcagttactaaaaattcaatcgtacctgcacttctataatttgctgcacgtgcaactttaacagcatcgttacatatttgttgtcgtctttcttcagttaatgctgcacaaggagattcttcgattaatttttgatttttacgttgtacagaacaatcacgttcccctaaatgtacataattatcctgcccatctcccataacttgaacttcaacatgttttgcaacaggtataaaagcctcaacataaacacgatcatcatcaaagtatttttttccttcacttttagcttctttaaatgccttttctaaatcttcagctttctttacaatacgtatacctttaccaccaccgccactggcagctttgataacaactggataaccgatgtctttggcaagcttctcaatttcagacacatggttcacagcaccatttgatcctggaatcacaggaacacctgcatgatgaactgtttgtcttgctgttattttatcccccattatttccatcgtttttttagtaggccctataaacgctatgccttgttcctcaacggtttgagcaaattttgttgattctgataaaaagccatatcctgggtgaattgcattagcaccagtgatttgtgcagcagatatgatgcggtcaatatttaaataactatctaaagcattagcttccccaatacatatagcttgatctgctaaatgtacatgcaagctttgctcgtccccttttgcataaactgctacagtttcaatcccatattctctgcaagctcttataatccttacagcaatttcacctctgttcgcaattaaacaacgaagcatttacttaccccctttacttaatacgtaccaaaacttggtcgtattcaacatttgtgccatgatcagctactatttcagtaatttctccagcaacatctgttgttacctcgtttaatactttcatcgcttcaacatatcctataatatctcccttgttaactttgtcaccgacattcacaattggttcagttaattctttactatcttgtaaaaagaatgtacctaccattggtgatttaatgtcatgataatcatttgtcgaaacatcggagttatcattcgcttttgaagctgtcaaatcattattgttcatactttgatttgattgattactgtgtgcagccaaatgattcgagtcagtgaagtcaatttctatttcatcttcaaaatttttatatttaaatttcttaacatcattttccttcactaatttgattatttgttcgattttttcaatattcattttacaaatccccttttaaaattgttgctaattttttcgaagtatgtcgcaagctagatgtatcaaaaattggagtcttttgatgactcttaagaatttcattaaacagagacatttgttcccgattcttatctacagcttcttggaatgatatccatttaaattgaattgtatcttttggtttcatctgtgctaactttggcagatcaaatttgcatacagttgcaattttggtataaccacctatcgtttgtttatcattaagcagaataataggttgaccatcatttggtacttgaacactaccaagagcaaccggttcagaaatgatatctgcttgattaattggtgcaacgctgtcaccttccaaacgatagcccatacggtctgattgttcagtaattaaatatggatgatttacaattttcgctctagcctcttcagaaaatgcctcgaattgaggtccttgaagaatgtgtataatattattttctggcaataaatcgtcctgtaaatgaatagtctttccaatgttttctttaaagtcattatttattttcactgttattacatcattagctaataactttctacctttgaatcctcctatactgcttcgggtatgtgttgcataactttcagcaatagaaggtacgttgatagaatgaccaaaagtaagataaccgcgtgcacctttggttatagcacctatttttaaaatgtcacctttctcagctaatatgacagaattcattgatatagttttattatttagcgaagcattaatactaccaccggttataacaaatgtattttgcgtattaaattgaatggtaggaccaatcaaagtatattcaatcgctggaccatcattgttaattaatgactgcgcaaccttaaaactaaattgatccatggcacctgcgcctgaaaatccaatatgttcataaccttttcttcctagatcttgtaccgttgaaaagagacctggttgtaaaatcttaattgacattttcaatcaccacccagtcatcaacattaaagttgccatctgatatatctctttcgatttgtataaatttctgttcatctattgcataaaattgtatccattctcctgcttcgtacattgacattggttcacgctcgctgctaaatacttttaacggtgtgcgtccaataatttgccatccgccaggagaatctgatggatatagtcctgtttgattattcgcaatacctacagaacctgcatgaatttttaaccttggctgattacgtctaggtgtatgtagttgttcatcaagtccgcctaagtatggaaatcctggcataaatcctagcatatatattaaataaggtttacttgtatgtttttcaataacttgctcaacagttattcgattatgctttgctacttcttcaatatctggtccatatgtaccaccatattgaacaggtattttaataatacgattggtttgattcacagcatgaacatttttttcattaaatttgttaagttctaaattttcaattaatttagaagatgttatagcttgttcatcaaaatatattagaactgctcgatacgaagggacaatatcttgaatttctaatatttctttttctcgtatccaccgtaccattgctgtgacattacgatatgtctcttcggatattttattttcaaaataaatcataattgtctgctcgttaataaatcttacatccactttaaatccccctttgtattgcaataaaccagtattgaataccttttcattgtatcattgagaagcacaagttgtttaataagtaattcaaatcgcatacaataacaaatgataatcaatttgttttctcggaaatattttgcttttttaaaatggagtagttaatattgtaactcttacactaatttaggttctgctatcattcggtctgatggaaaatttttacttttcatctgtccgattttttgattttgaatataaaaaagcacgaccgaagtatcattaacacacttcaatcgcgcaattaaataatctatttgatcatttattggatattaacaatttttacgttcatttcgccaccattaggtagtggaacacgaacttcatcatctaaacctttaccaattaacgctttagccattggtgattcatttgaaatcttaccattaaatgcatctgattcagctgaaccaacgatttgataactttcctcttcatcacctggtaattctacaaacgttactgttttaccaattttaacaacgttgttatctccagtatcttcaatgattaatgcatttcttaacatatgctcaattctttgaatatcttgttcgatgaatccttgttcatcttttgctgcatcatactcagagttctctgataagtcaccaaatgaacgtgcaactttaattttctctacaacttcaggacgcttaactgtttttaattcttcaagttcacgctctaatttttcaaaaccttcttgagtcattggatattgcttttgattttccatattgtcatcttcctttactgaattatactattgcttgctaactaaagactgaatttttgttgtcataatatctattgcaactttattgctcccaccttcaggaataattatatcagcatatttcttagtcggttcaataaattggtcatgcataggtctaacaacacttaaatattgattgataacagagtccattgaacgcccacgctctttagtatctcgtgttaaacggcgtaatattctcaagtctgcatctgtatcaacatatattttaacatccatcatatcacgtaataccttattttctaaagcgaaaataccttctacgataataacatctttaggtttaaaatcaatggtaatgtcacttcttgtatgactagcataatcatatgtcggtacttctactgctttaccatttttcaagtctttaagattttcaattaataaatcattatcgaatgcaaatggatggtcataattggtttctaggcgctcgtcgaaagtcaagtgcttttgatctttataatagtaatcttgagcaagtaaagcgacactatgaccttctaagtttttcataatttcgttagttacagttgtttttcctgagccagatccaccagctatgccaatgattgtagtagctttcattagccaatttcctttctcatcatgttgtttggatatatcgggcgatccactttaatttgaacgatttgtaatggatggcgcgccgcgtctaagctgttaccttcttcatcataaattgcttctactacttgtgtaaatgtttcaatttctggaccaaagaattctatttcttgacctggtttaaagttatttcgttgttgaatagtcgcaatttttgtatcttcattatagtctaataccaaaccacaaaaatcaaatggtgattttttagattgttgttgaccaaacatctgttcttcataaccaggtgttccctcaaagaatgctggtgcagtgtctctatttgcacatttatctaactcaattaaccattccggattaatcttaaagttgtcaggatctgccgcatacgcatcaatgactttacgatatactgagacaactgttgcaatataatgaattgacttcatacgtccttcaatttttaatgagtccacaccaatatccatcatttgaggaattgattcgattaattttaaatctttaggactcatcgcaaacggtgtaacttcaccttgattataaaaaacatcaagttcaccattatcatcaacttctaataattcataatcccaacggcaactttgacagcaaccgcctctgttggaatcccttgcagtcatatgattacttaatgtacatctacctgaataggcgatacacatagcaccatgaataaatgcttcgatttcaatatctactttttccttcatttcacgcatttccatcgcgccggtctcacgtgctaatacaacacgatccaatccttcttctttccaatattctacagctttgtaattagaaagtgattgttgagtagataaatgaatttcaagttttggcgcaacttctttacatgtttcgataattaaaggatctgcaacaatgatacctgtcgcaccagtcttttccaaattacgcaaatatgattctagaccttcaatattctcatcatgtgcaataatatttgtcgtaacataaattttggcaccgtaacggttcgcaaattcaacaccttcagctatttcttccatcgtgaaattatcagcatttgaacgtaatccatattcttgaccacctaaaaatacggcatcagcgccataatgtactgctatttttaacttttctaagtttccagcaggtgctaataattctggtttcttcataactgttttaggagttgatttaatctcttctattgtcttcatgattaacctccttaatataccgtttgtttatataagaaaccttcgtcaaatggtcgatgatcaggttgaatttcttcaattgggtccatcaacataaatttctcatcttcatagatttcaggatcttcattgtacaaatctatcgcttgacgatactgttccgttaccacattaatatattcttccgtttgtagaataccatcgattttaaatgaatctatacccgcctcaaaaaatggtgctaattcttcaattaaacaaatgtcgtttggtgacataatgtgcgtaccattgtaatcttcgtaaactgggtaattattttgtctttcttcatcataaagtaataaagattgttcatcattgcgacgttcaattttcatttggcgatcttggaacgtataataattgcctagtagcatacgctttgattggaacatacaagtcattccttgaacttgcacctcaatttccacatttgaattttcttttatattaataatttcatccaaattcagctcacgtgctaagacagctcttgatgcgcctcttttaccccagtaattacattgaaaatgattagttactaacgtctctgcattccaatgaagtggtattggattctcttgcgccttcacatacattactactgctggatccccgaaaataattctgtcaactcgtatttcatgtaaaaaattaatataatcttctacagcatctaaatgataattatgaaataatccattcaccgccgcatatacttttttatcgtttttgtgagctaatgcgacagcctctgtcatttgttgtctattgaattcccctggaagtcttaaaccaaacttttgctcgccaattacaaaagcatctgcacctaaatcaataagtgtttccatatggcttaatgacttgggtgtgacaagtaattctgtcatagtcattctcctttaattgaaatcgctaatccatcgtctatatttaaaaaattcgttgtatatcctggttgctttattaaccactcattataatcttgaacctttttaaccatttgtcttacatttctcgatctaacaatcccaatatccgatacaaaaccgtgatataaaacattatctgtaattacgagaccttggtgctttaaaagtggtgtatatatttcaaaaaatttctttgattgcgcttttgctgcatcaataaatatcatatcataaactttgtcatttacattttcaaattgctctaaagcattaccttcaataattcgaacctggttttcaaaatgataagtagctaaattttgtttagcatattgaatcatcgtttcattacgctctatcgttgtgacatgaatgtcatcagatatagaagcgaattgcatagaactatagccgattgctgtaccaatttctaaaatatttttaacattattcatacgaattaattgcttaattaaatctaatgttaaacgatctacaattggcacttcatttacttcggcaaattcacgcaaaacttcgattgaactattttgatgttgatgtaaatctattaaatattttttatttaggtcatccatgttttaaacttcctttatgtaaaataagtcaatatgattatgacaataaaataaatcagccttcacaattgattataattttgccaaccaattaaatgactgatttcgtgttagacgcaaagctattttatttatagaagcgaatcattcatataaaatttaactttagatattttaccatattttcaataaaattataagcgttaattatttatacattgcttaacttaaaaaaatactcttgcctccccatcttaaggttagcaagagtaaaatctttttaattattcttccatttcagtatttacaacttcttcaatcatgtcccattcttcatcagtttcgattggtactaacttaccaccgtcacctgactcatctggttcattgatcattggtacaagctcaatcatatcgtcttcatctgattgagcaccttcttcagctaagataacatactcttttttgaattcaggatgataaaattctaaaacttttcggtataaaacttcatttccctcttcatcgaataaagttaataattcttcttcgttattaatttctagttgtgaatcatgattatgttcagtcatagtaaaatctccttttaatgtagtgaatctaaatagccttgtaaaataaataccgctgccattttatcaatcacttgttttcttttttgtcttgaaacatctgcttctaataatgatcgttcagcagccattgtgcttaatctttcatcccacatcacaatctcaatagaaggataagcttctaataatttttctttatatgttaacgaagcttcgcctcgaaatcctattgaattattcatgtttttaggtagtcctattacgactgtacccacattatgttttttaataatgtctactaattggtcaatacctaattcattattttcttcattgattcggagtgtgtctaatccttgtgccgtccaacccattatatcactaattgcaattcctaccgttctactaccgacatcgagtcctaaaattttatgttgtaacataaattatttattttgctcttttaaatagtaagaaacaagctcttccataataacatctctatcaatatgacgaatttgatttcttgcttcattttggcgtggaatatacgcagggtcacctgataataaataacctacaatttggtttacggcattatatcctcgttcatctaatgttcgataaacattatttaaaacatctcttacatcttgcgttggaagttcttcatagtcgaatttcattgttttatcaaagttttccatttgcgacactcctttaattacaaatataactcactatcatcatacaatattatggctttaaattatagatttttaatgtaatctttaataaagcttaatgattttgagatattttcaggttgtgtaccgccaccttgagccatatctggacgaccgccacctttaccaccaacgattggtgccatttgtttgataagatcaccggctttaacgttatttgttaaagatttagggacagttgcaaccatcgatactttatcatcaacattacttgcaagaatgataattgtatcttgtagtttagatttaaaatcgtccattgtcgagcgaattgctttcgcatttggtacatccacttcagtaaccaatactttatagccattgatttcttcaacttgatcttcaatattacccattttaagtgatgtgatttctttgtcacgttgctctaattgttttaataatgctttttcttcatcttgtaattgtgttaacttatcgactacttgatcatcagatttcactttcagttgtgatttcatcgtattaaatttctcttgaatatcttctaaatataagaaagctgctttacctgttaatgcttcaatacgacgcacaccagctcctgtacctgactcacttactattttgaataagccaatttcagaagtattgcggacatgaataccaccacataattcaattgaaaatggtgccatatttactacacgcacaacatcaccatatttttcaccgaataatgccattgcgcccatttctttagctgaagcaatatccatttcttgaatgttaacgtcaatacctttccaaatttcttcatttactaagcgttcaacttgatcaatttcatcattagtcattggaccaaaatgagagaaatcaaaacgtaaacgatctgcttctactagtgaaccagcttggttaacatgatcacccagtactgatttcaacgctgcatgtaataaatgtgttgcactatggttcttttgaatgtcacgtcgatcattttggttcacttcagcagacactgtagtgccaacatttacttggccaaattgtactactcctttatgcaagttttgaccatttggtgctttggttacttcactaacagcaatttcaaaattgtcattataaacaatacctgtatccgcaacttgtccaccactgactgcataaaatggtgtttccgttaacatgaagtatactgtttcacccgcttcaacttgtgaaacttcttcaccattatatatcaagtgtgttagtgttgtttgagctgtcgcagtatcataaccaacaaaagtacttgcagatgtaatatttttcaatacttcactttgaacttgcattgattgagaattttgacgtgcttgacgtgcacgatcacgttgttgttgcatttctgactcgaatgttgtcatatcaactttcaatcctgcttgcactgctatttcttcagttaattcaattgggaacccatacgtatcatacaatttaaatgcatctttcccattaatttcatttgttgtcgctttagcttttttaattaattcatttaaaatcgctaagccatcttctaatgtttcatggaatcgttcttcttcagactttataacacgcttaatgaaatctgctttttccttaacatttggataatatggttccataatgtctgcaacaatatcaacaagtttgtacataaatggctcattgattcctaacgtttgactaaaacgaacggcacgacgtaacaatcgacgtaatacatatcctctaccttcattggcaggtaatgcaccatcagaaattgcaaatgcaatcgtacgaatgtggtcagcaattactttaaatgccacatcttgttcgttgtttactaaatattgtttacctgatactttttcgatttcattcattataggcataaataaatctgtttcatagttagtacgtacattttgagaaactgaggccatacgctcaagccccatgccagtatcaatgtttttattaggtaatggtgtgtaactatgatctttattatgattgaattcactaaatactaagttccatacttcaagatagcgttcattttctccacctggatacatttcttctgccggatcgtcttgtccatatgcttctccgcgatcatagaaaatctcagtgtttggtcctgaaggcccttcaccaatatcccagaagttaccttcaatgcgaataatacgactttcttcaagcccaatatctttatgccaaatgttgtatgcttccatatcttccggatgaatcgtaacgtacaatttatctggctccatccccatccatttatcactcgttaaaaattcccaagcaaattcaatcgcttcttgtttaaaataatcaccaattgagaagttacctaacatttcaaagaatgtatggtgacgcgctgtgaaaccaacattttcaatatcatttgtacgaatagctttttgagagtttacaattcttggctttttaggtgtttcacgtccatcaaaatatttctttaatgttgctacacctgaattaatccataataatgtatcatcatcaattggcactaatggtgcagaaggttcaaccatatgtcctttttcaacaaagaaatctagatatttttgtctaatttcactcgcttttaactttttcatcatttacacatcctatttactgtttttaaattaccattccataaaaattgatgacacagatagtcgatttgaaaaactagtataaatcaatatcattttttattattaaaaaataaaaaacgcccatcctcaaaagggacgaacgttatcgcggtaccaccctagttataaatgcaattcaacacatttatcactttaaatcgactatacagttgtgcataaagtagcgttcactaatgtttgttgtacttttcaccaaccagtacatctctgataaacaaatcattaactactcatctttatacgaatttaattctattttagttacatttacgcttgttgtcaacgttctataaagtcatacggcgtgatttctcccatattaatcattgggtcaattttaaacattgtagcttccgttaatacatttgtatctgtttttgttgaatcagacataacttcttcactatcattcgatgacattggcgcttctacttgatcatctattgtcgtttgtgaagctcctgtatcattagttgctgtgttttccagcatttcttcatcttctgaattaaaataatttttcaacaatgtacataattgtgttaaacgcgcttgaccatttgtttttaatccaatatcaaatgcttccggatcaccaagtaaaactaaactcgttttcgctctagttaaaccagtatataatatcggtctttgtaacattctaaaatactgtttaacaataggcatgataacaataggaaattctgaaccttgtgatttatggattgatgtacaataagcatgtgttaattccatcatatcttgtttcgtaaatgtaatttcattaccttcaaaatccacaacaagtacatctttattaagggcattttctttcgcccaaaaaataccaacaataactcctatgtcaccattgaatatattatcatttggcctattaacaagttgtaatactttgtcaccttttctaaagactacatcaccaaactcaatttctcgtgtgtctttctttttagggtttaaaatatcttgtaaaacttgatttaaacgtttaataccggcatttcctttatacattggtgcaagcacttgaatatcagccatagtataccctttattaacagcactagtaactaccttctctacaactgttggtatttggtttgcctgacagttaataaaacttctatcatgaaaacgctgtgtaatatcaattttctgacccaacttcattcgatgtgctaattctataatgcttgaaccatcttgttgacgatatacttcagtcagattaactcgtggtatagctttcgattcaattaaatctttaaatacttgaccaggacctacagaaggcaattggtcctcatcacctacaaatatcaattgtgcatctaaaggaactgcacttaaaaattggtggaacaaccaagtatctaccatagacatctcatcaatgattatgagtcgtgcgtttatttcattttctaatatatcctctggctttgtgtcttgattccaacctattaaacgatgaatcgtcatagcttctaatccagttgactcttgtagtctcttggacgctcttcctgttggcgctgctaatacaactggataatcatcattgacataatcatcataatctaatgataagccatgaatctcagcatataattcaacaatacctttaattactgtcgtttttcctgttcccggtccaccggttaatagcatcaccttagaattgatagccgtttgcaaagcttctttttgtgaagctgcatagttcacttgattcgcatcttctatttcaccaatatgcatttgtaaatctgactgttcaatttctgtaagtttatttgtatgcgtctttattctgaataagttttgaacacttttgatttcagaataatacaaacttggaattgcaacttgttcattgtcaataattagtcgtttttcctcatttaagtattgcaacatttcgtctaatttttcaggttcgatgacctcttcatcttgataatttaatacatcaaccgttaaatctataacaacattgataggcaaatatgtatgtccctgtttaatacattcttcttctaacgtatagagcaacgcagcttttaatcgttcattatcgttataagcgataccaatatttctagcaagttgatctgctttattaaaaccaatacctttaatatcataaatcaattgatatggatttcgatctaaaatagtcagtgtatcgccgagataaaactgataaattgccattgaaagtttaggaccaaaccctaaatcatgtaaacgaatcattattttttcagattcttgatttgctgaaatttgttctgcaatttgtttctgtttctttttagataatcccgaaactttttctagcactgaatggtcatctaatatatcatttatcgcattgtcacctaatgtattaacaatattttgagctgtctttttacctacacctttaaacaaatcactagataaataacttataattgcttctttcgtttgtggcatttctttttcaaaagtctctgcttttaattgtttaccataacgtggatgatcaacaacttgccctttaaatgtgtagacatcgccttcaacaatattcggaagaaaccctacaacagttggcattgtatcaaagtcttcatttgtttcaatagtatctactttaagcactgtataaaaattatcactgttttgaaacaatatcgcttcaacagtacctttgatcattgaataatcaaatagtgtagggtctgacatgttactcctcctctttcattttagtgaatgttttcagcgcatgctgacttaataagtgtttagggtcgatagtcacagcttctttaaaatgagttatggcttcatcaatatcttcatttttcataaataacgctaagcccaaattgtatcttgcatcaacatgatttttatcaatcgttaatacatgtttaagttgagttatggcttcattaaacatttctaattgacataatacaagaccatattgaaattgaacttctgcatctttgtctttatctagttccgcagcagtcattaaatacggcaatgccagcttaaatgattctaactgattaaacgccataccgatcatataattacaatcaacttgttcaatctctgtttgtaatgcttgttgatataatttaatagcttcttgataacgttgctgattataatatacatttgctagattataaaatacgacgccattcttcggatctattgttaaagctttttggaaaaaacgctctgccttttcaatctcattcgcatcagcaagtacgataccagcattaatataattttcaataattgtaggatcttcttcgatatttccgaacaatgcttgtaacgcttcttctatttttccattttgtatgtattgataaattgtttgttgatctatcatttacgaacctcatttctcatcaattataacatcttgataaattgtatgtctcgaatcacttaacaacgaataaaatataatctaatatcatcttcattcatgaaaaagcgggaatggaatagaaatgcttaagaaccattaacggtttgttatgtaatggttcttccacattagccaccactattatgtacttaaaaataagaatacataattagattcatgcatagggagtgggacagaaatgatattttaacaaaattaaattcgtttaccccaactcgcacattattgaaagctgacttttggtcagcttctgtgttggggccccgtccccaacttccattgcctgttgaaattggggttccaatttctctatgttgtggtcccgccaatataacattgtagagcctaggacattgtgatgtcccagactctatcatcatgaattattctcatcaaaaactgtctttcgtcattttcgacgttgaaacttcaaataagtaatttattgttgccattgtttatacaacataatttaattgaccttcatttttgaacacatcgtcaattgttgctccaccaagacacacatcaccttgataaaaaacaactgcttgtccaggtgtgattgctcttactggctcagcaaaagtaacacgtagtgcatggtcgttttcacgtttcacaaaaactttcgtatctttttggcgatatctaaatttagctgtacattcaaaaccttgatctaagtcattatcttctggatttacaaatgaatagtctgaagcaattaagtaatcactgtataatgcatcgtgatggaatccttgttctacatataaaacattatcttttaggtttttaccgacaacaaaccaaggatcgccatctccacctatacctaatccatgtctttgtcctattgtgtaatacatcaaaccactatgtttacccattttcttaccatcaagtgttatcatatcacccggttgtgcaggtaaatattgtgataaaaatgttttaaagtttttttcgccgataaaacaaatgcctgtagaatcttttttcttagcagtaacaagtccttgttcttcagcaattcgacgcacttcactcttttcgatgtcgccaattgggaacatcacttttgaaagttgttgttgagataattgattcaagaagtatgtttgatctttattattatctacaccacgtaacatttcaacatgaccatcttcatgacgatgtatgcgtgcgtaatgtcctgttgctacataatctgcacctaaattcatcgcatgatctaaaaaggctttaaacttaatttctttattacacataacgtctggatttggagtacgaccttttttgtattcatctaagaaatacgtaaagactttatcccaatattctttttcaaaattaacagcgtaatatggaatgccaatttgattacacacttcaataacatcgttgtaatcttcagttgcagtacatacgccattttcgtcagtgtcatcccagtttttcataaatatgccaatgacatcataaccttgttcttttaagacgtgggctgttacagaactatctacaccgcctgacataccaacgacaacacgtatatctttatttgacaattatgactcctccttaaatttaaaatatattttatgaatttcagctacaattgcattaatttcattttcagtagtcaattcgttaaaactaaatcgaatcgaatgatttgatcgctcctcatcttcgaacattgcatctaaaacatgcgacggttgtgtagagcctgctgtacatgcagatccagacgacacatagatttgtgccatatccaacaatgttaacatcgtttcaacttcaacaaacggaaaatatagatttacaatatggcctgtagcatccgtcattgaaccatttaattcaaatggaatcgctctttcttgtaatttaactaaaaattgttcttttaaattcattaaatgaatattgttatcgtctcgattcttttctgctaattgtaatgctttagccatcccaacaatttgcgcaagattttcagtgcctgcacggcgtttcaattcttgttcaccgccaagttgaggataatctagtgtaacatggtctttaactagtaatgcaccgacaccttttggtccgccaaacttatgagcagtaatactcattgcgtcgatctcaaattcgtcaaacttaacatcaagatgtccaattgcttgaaccgcatcaacatggaaatatgcatttgtctcagcaataatatcttgaatatcataaatttgttgcactgtgccaacttcattatttacaaacataatagatactaaaatcgtcttatctgtaattgtttcttcaagttggtctaaatcaatagcacctgtatcatcaacatctagatatgttacatcaaaaccttctcgctctaattgttcaaaaacatgtaacacagaatgatgttcaatcttcgatgtgataatgtgattacccaattgttcatttgcttttactatgcctttaattgccgtattattcgattctgttgcgccactcgtaaatataatttcatgtgtatctgcaccaagtaattgtgcaatttgacgtcttgactcatctaaatatttacgcgcatctcttcccttagcatgtattgatgatggattaccataatgcgaattgtaaatcgtcatcatcgcatctactacttcaggttttactggtgtggtcgcagcataatctgcataaatttccatgtttggacactcctcacaattttatcaatgttccaataatagcaccttacatactatttttctacttttctgtttaactttatttataatgtttttaattatattttaccattttctacacatgcttttcgataggcttttttaagtttatcgctttattcttgtcttttttataaattttagtatttgcagatatttttttatttgtaaaatgtaacgtactattattttggttatgagcaatttaatatttatctggttattcgattggtatacttcttatatcataaaaaaggaaggacgatataaaaatggcgattaaatattcagcattaaaccttgtccctattcgagaaggtgacgatgaacaaacagcaattaatgatatggttaatctcgcacaacatttagacgaattatcatatgaaagatattggattgctgaacaccataacgctcccaacctagtaagttcagcaactgctttattaattcaacatacgttagaacatacgaaacacatacgtgtaggttctggaggcatcatgttacctaatcatgctccattaatcgttgcggaacaatttggcacgatggcaacattatttccaaatcgtgtcgatttaggattaggacgtgcacctggaacagatatgatgaccgcaagtgcattaagacgagatcaacatgatggtgtttataaatttccagaagaggtttcattattacaacaatatttcggcccagctcaccaacaagcatatgttcgtgcttatccagcagtaggtaaaaatgtgcctttatacattcttggttcttcaacagattctgcacatttagctgctcgcaaagggcttccatatgtgttcgctggacattttgcacctcaacaaatgaaagaagctatcgaaatttacaaaacgttatttgaaccttctgatgtattagacgaaccttatgttattgtatgtttaaatacaatcgttgctgaaaatgatgacgaagcacaatatttagcttcatctatggcacaagtaatggttagtatcactcgtggcagaatgcagcccgttcaaccgccaacacatgaactacaaaatatattaacgccgagagaatatgcgatggctatggaaagacagaaaatatcattaataggttcagaaaatactgttcaacaaaaaattcaagattttatggaaacttatggtgaagtcaacgaaattatggcaataagttatatttatgataaagatatgcaattagactcttatcgtcggttcaagaatgttataaatcagataaatgaaaaaaacactttataatgtgataaataaactaagtgaaagtatgtatccataatattaataaaaataaacagtaacggcattttgaatgaaagatgtctttattgttcaatcatttttttagtaatgattcaaattcacttaaaattctaaagcaaatatgaaagcgccccttcaactttacactgtgttagtgtttatttgatggggcgctttcaaaatattgaaaaacatatccaaaatttaaagaaatttatttctctttatcttctttttcttttttctcttcgttattcgatcctgtatattcatttatcttatcttttacatttttaacttgttcattatcgctatttttaaatttttctactgcgtctttagctttatccataaaactcatattaatcgctcctcttatatttgattagtttaattgaacttattttttaagtttatcaattgcatcagttattttgtttttagcattttcaacaacttcttttgctttaccagtcgctttatcttgctgaccttctttttctaattctttgttatcagtaacgttacctactgtttctttaacatttcctttaaattgatcgaacttactttcgtctgccatagtgaaacctccttggatgtatatatttatataccactaaggacgttcgctaaacattataatatgaagtttttatgttatagtatagtatttatacgattaaatataaaacatgtatccgtctaaatcttcacttgtatctacatattccgctaaatatttcaatgttgtattatctaaaacatctctcactgcatctctcatgcgaatccatagttgtttttgcgcaggtggttctgattcaatactttcaacaaatgtaattggaccttctaacagtcttataatatcccctgctgagatttcttccgctggtactcttaattggtatccacctttagcaccgcgtacacttcgaattaaccccgcatttcttaaaggacctacaagctgttctaaatataaatcactcaaattattttcttcagcaattgactttaatgatatacatccttgcccctcttttttagcaagagaaatcatcaatgtaagtccatatctccctttagtagaaattttcattgtataacctcacttaattcgaatattgatattcccattttagcattttttgagttaagatagtataagaaaggtgtgacaaatgtgagtacagaaccattagcatcgagaatgcgcccaaaaaatatagatgaaatcatttcccaacaacatttagttggaccaagaggcattatcagaagaatggttgatacaaaaaaattaacttcaatgattttttatggtccacctggtataggcaaaacaagtattgccaaagcaatttcgggcagtacgcaatataaattcagacaattgaatgctgtaactaacactaaaaaagatatgcaacttgttgttgaagaagctaaaatgtctggtcaagttatcttgttattagatgaaatacatcgactagataaagctaaacaagactttttattacctcatttagaaaatggcaaaatcgtcttgattggtgctacaacttcaaatccttatcatgctatcaatccagcgattcgttcaagagcgcaaattttcgagttatatcctttaaatgacgaagatgtgcgccaagcgttaactcgtgcaatagaagatgatgagaatggtttgaaaacatatcaacccaaaattgatgaagatgccatgacctacttttctacacaaagccaaggtgatgttcgtagtgcgttaaatgcattggaattagctgtattaagcgcagataatgacaaagacggttatcgacatgttacattgcaagatgctaaagactgtttacaaaaaggtgcatttgtaagtgataaggatggtgacatgcattacgatgttatgagcgctttccaaaaatctatccgtggtagcgacgtcaatgccgctttacattatttagcacgattaattgaagctggagatttacctacaatagttcgacgattacttgtaattagctatgaggatataggcttagcctcacctaatgctggtcagagaacacttgctgctattgaatcagcagaacgtctaggtttaccagaagctagaattccactaagccaagcagtaatcgaactatgcttatcacctaagtcaaattcagcaatgagtgccattgatagtgcattgtccgatattagaaacggtcatgtgggccaaattccaaaccatttaaaagatggacattatcaaggtgctaaagatctaggccgatctattggttacaaatatccacaccaatatgttaatggctatgtttcacagcaatatttacctgataaacttaaaaacaaaatttattatgaaccaaaaacgacatctaaaagtgaacaacaactcaaagaaatatataacaacttacttaaacaaaggccgtaaaaataagattaaatcgattacctttgatattttagctataatcaaatcaaaactgactagtacacgaagcatattctactatgcttgcgaactagtcagttttagttttatggtgtggttacacttgccttacgttgaaaattatgactttcaaaattaattattgccctttgtctttaatgcgacgaactggaatatcttttaatacgtcattcaccacataacttgcacatattaatccaacaacacttggcacaaaggcatttgaagaaggtggcatttgtccttttcgattgatagcatttttatctccaactatatcttttacatcttctcttatgacaattggactttcatctgaaaatacaactggaatccctttacgaattcctagttttttcaatttttgacgaataattttggccattggatcggtatgtgttttagagatatctgaaattgtaaaacgtgttggatctgttttatttgcagcacccatactggaaatcactttaatccctcggtcaagacactctttcattaagtgtactttgtacattattgtatcacttgcatctacaaaataatctatatcgtaattatcgaaaatttcttcatatgtctcttctgtataaaacatatgtaaaggcgtgactttacaatctggattaattaatttaatacgttcttccatcaaagaaactttactttgtcctactgttgtagttaaagcgtgtaattgtctgtttacatttgtaatatcaacatcatctttatctattaatataatatgaccaatattcgttcttgctaatgcttcagcagcaaatgaaccaacacctccaacgccaagtatgacaacagtttgttgcttcaataaatctaaaccttgttgtccaatcgctagttcatttcttgaaaattgatgtttcattattttacctctttcactgatttatacataagtacatagtaacttaaaattttatgtttagcattatcgctttgattattttcccaaaattcaacgaggaaacatttattaaaccctattaaacccaactaattctttattaaaaacttaaagaaaagcataaaaatacgcaagacaaagtcttgcgtatcgatagagtccgtattgccgtagttataatagcttgatcattcggcctgttatatacaggtgggtgccctgtttcttgttttgtacgtccttcatataaggcgtgtacgctgcaagaaaacccattgggctcccttgatcaaagagtgttaggcccaaattaaaaagcaaacttacgaacaactcagatgactatcttatgatgttatattaccacataattaaaattaatgaaattataacaaaccaaagtttattgattttttaaaatttagtgacgaattcgcaaagaaagttcttctaattgtttatcagaaacttcaccaggcgcattcgttaataaacatgtagcagatgctgttttagggaatgcgattgtatctctcaagtttgttctattagtcaataacatgactaatcggtctaatcctaatgcaataccgccatgtggtggtgcaccatatttaaatgcatctagtaagaagccgaactgttcttgtgcttgttctttagtaaatccaagaacttcgaacattttttcttgtaactcaccatcatgaattctgattgaaccgccacctaattcataaccatttaatactatgtcataagcatttgcctcagcttcttctggcgcagtgccaagcttagcaatatcagcttcttttggagatgtaaatggatgatgtgctgcaacgtaacgtttcgcatcttcatcatattctaataatggccaatctgtcacccataagaagtttaattttgtttcatcgattaaacctaattctttagctaatttgacacgtaatgcacctaaactttgtgcaacgacatttggtttgtctgcaacaaacattactaagtcaccagcttcagcaccagttaatgtaagtaatgtttcaacattttctgtttcaaagaaacgtccaattggacctgtcaaaccatcttccacaactttaacccacgctaatcctttagcaccatagatgtttacaaattctgttaaagcatccatatctttacgagtatattgttcagctgcacctttagcaacaattgctttaatttcaccatcattttcaacagtatctttaaatactttaaagtccatatcacgtcctaattgagaaacgtcaattaattccatttcaaaacgtgtatctggtttatcagaaccatagcgacgcatcgcttctttatatgtcatgcgtgggaaagcgccattaatttcaacgcctttaacttctttaacaacttttttaagcatttcttcacccatttgcatcacatcttcttgatctacaaaactcatttcaatatcgacttgtgtaaattcaggttgacgatctgcacgtaaatcttcgtcacggaagcattttacgatttggtagtatttgtcaaatccactaatcatcaataattgcttaaataattgtggtgattgtggtaatgcataaaattcaccatcatgaacacgagatggtactaaatagtcacgtgcaccctcaggtgttgacttcgttagtactggtgtttcgatgtcaaagaacccttcatcatccaaatattgacgaatagaacgtgtaatttgatgtctcattttaaatgtttgcgctaactcttgacgacgtaaatctaaataacggtattttaatcgaatattttcatcaacgttaacattttcttcatttatagaaaatggtggtgtctcagatttattaatcactttaatatttgtaacttgtacttcaacttggccagttttaattttaggattaactgtttcagggtcacgcttcgtaactgtaccttgaacttctacaacatattcagaacgtactgtttcagcaattttcaatgcctcttctgaaaatgcaggattaaacacgacttgtacaattccttctctatctcttaaatcaacgaaaatcaatccacctaggtcacgacgattgttaacccatccttttaatgtaatttcttgtcctaaaaatgcctcagtaactaatccacaataagttgttctcttactcatattttaacgccctctctacttcttaaaatattcgactaatgcgtctaattcaattgtttcagattcaccagttgtcatatttttaacatcgattttattattttctaattcttgatcaccaataacgattgtaaacttggcacctaaacggtctgcttgtttcatttgtcctttaattttacgctgtaagtagtctttatctgctttaataccattatgtctcaaatgatttaataacttcacagcatatcgatctgcttgatcacccattgtaacaatgaataaatctaagttttcttcaatatctaattcgataccttcttcttcaagtgcaagcaataatcgttctatacttagcgcaaaaccaatacctgtttcacttggaccatctagcaattctaataaaccattataacggccaccaccacaaagagttgtaatggcaccatcatagttagggttatccatcattaattcaaatgctgtatgtgtataataatccaatccacgaactaagttaggatcttcaatatatggaatatctaaatcatctaaataagcttttacttgttcataatatgccttagattcctcatttaagaaatcagtgattctaggtgcagtcttaatcgcttctttatcacggtctactttacaatccaaaattcgcatcggatttgtatgcaaacgtgattgacaatctgaacaaaattcatgaattactggttcaaagtgtttcactaacgcttcgttatattcttttcgagacgccatatcccctacactattaataacaagctttaaatgttttaatccaaatgattgataaatatgcataaccatagctaatacttctgcatctacgctaggattttcagcaccaatagcttctacaccaaattgattaaattgacgatagcgccctttttgcttacgttcatatctaaacatcggtccattgtaataaagtttaattggttggtttggattaccttgcattttatgttcaatatatgaacgcacaactgcagctgttccctcaggtcttaatgtaatacttctatcgcctttatctttaaatgtatacatttctttttgtacgacatctgttgaatcaccaacacctcttgcaaaaagatctgtactttcaaaaattggtgttcttatttctttataattataaaatgtcattaattcatctaattgattttcaatgtaacgccatttctttgaatcttcaggtaaaatatcctgcgtccctctaggtattttaatcattttgacatctccctcggcaaactattttatttaattacctttttaaaactaaaactatatacgatcacttaactttgcatgataaatcataattttaaaagcaaaagaaaaagcccttgcacagcctgaaactgcacaagggacgaatatccgtgttgccaccctcattggtttaaaatacatgcctaattgtaatcatcattactttttataagcgtgcatttaataaacccactcaaaacgtttaacgtacgtttaacggctttacttttcataaagcacctcttcttgtgttcaatgtatataaattactcagcataatctttcagtctatggattatattcctacacaatcttagttagattgctacctatttcatttaccatttcaagaatactaacggttttagttataaaattcaatatcaatgataactactttcacatatttttgcaagccctacgcagaaaaataaattttaaggccatcaacaattgcttgttctaaaatttgtctatgtaattgatctttaatcatcgtttcatcagttgggttactaatataacctaattctaataaaacagcaggaacttttgtttgtcttaacacttgataattttcttgtcttgaaccgcgattagaaagtagacctttcttctgaatcgtagcatctaacgtatctgctaaagctctttgattatcatgataccaataaactgtcattccatttgcattagatgattctaatgcatcattatgtatactcaaataggcatcgcctttgatatcacgattttctagtgaaacatatgtatcgtctgttcttgtcatcttaacagttgcgccttctttttctaaagtacgctgcaattcttttgctgttttcaacgtatagtctttttctaaacttttatatttagtattgcttgaagcaccctggtcactacctccatgaccaggatcaagcactattgttttaccttgcaaaggatttttctccttcgtattatccgcgacaatatctaaatttgtgtgccatccagctatccaacctttttcattactggatgtatcttcaacttcaatccatttacctactttaccaatctttttaaaatggtcacctttctcaactttatatatgactggatacgcagcgtttggacctgtacgtaattcagcattttcagttatcgtgatgttcccactatcttcactattgctattcagcaataaaaataaaaagatgataaataagacaaaggcaatcactactattagagtacgtttatttttaagaccctttttagataaccatgcctctatttttttcattgaattttgccgtcctgactttcataaataatagtgactggaccatcattatttatgctaacattcatgtgtgttccaaattcacctgttttcacagtaagaccatacgctcgtagcgcatcattaaaatactcataaatttttaccgcttgatcaggatttttagaatttgagaaacctggacggttacctttttttacatctgcatagagagtaaattgtgaaactgatagtatttcaccattcatttgttggatattaaagtttaatttattattgtcatcttcaaataatcttgcattagcaattttctttgcaattacatctgcatcttgctctgtagagttctgaccgataccgactaataaacaatatccttttttgatttgattatttaatgtatcattcgtcaccgatgcttctttaactctttgtacaactactttcatattttgcacctctagttccaaactcttgttactgtataaacatcaccaagttgtttgatcttttctaccacacgataaacatcattcacgtttttcaccatgacactaatatttattattgcatttttatcaatatctgaacgtcctgaaactttaattaaattgccggctgtcgagctaacagcttgtagtacttcattcaacaagccatttcggtcatacgcagttacctctaaatcaacctgatatttttgagttgcgtcttttgattttacccattcaacattaattagtcgttcagtttcgttcttaatatttgggcaatcagtgcgatgtactttaataccgtgacctttggtgatataacctacaatatcatcacctggtataggattacaacattttgacaacttgataagtacattttctaaaccttctacatagacaccactatcagtaatgatgttgtctttaataggcaatgatttcgtaacttcttgtgcttcatttaaagcacgttgtttatctaaaatacgttgtctttcagttaatttattaacaatctgtaaggatgtcacgccgccaaatcctacagctgcgaataaatcatcttcatttgcaaagttatatttttcattaacaacctgaatatttttctctgtcaaaatatcttcgactctaaatccttgctcttttatttcaacttcaaccatcattcggcctttttcaatattagatgaacgatcttgttttttgaagaaacttttaattttacctttggcactagacgatttaacaattttcaaccaatcacgacttggtccatatgaatgtttactagtacgtatttcaacaatatcgcctgtttgtaaaatatagtcaattggtacaattttgccattcaccttggcaccaatcatcttattacctacttcactgtgaatcgcataagcaaaatcaatcggcacagcaccatatggcaactcaataacatcactcgctggggtaaatgcgtatactttgtcactctgtaagtcatattttaaggtttccataaattcttgagcgtcagacgatgtatgatccgcttcagctaattcttttaaccaatttaacttattttgataagtttgatctttttcacttacttttttaccttctttgtaagcccagtgtgctgcaacaccatgctcagcaatttcgtgcatatcaaacgttcgtatttggatttcgagtgggtctccatttggacctactactgtagtatgcaatgactgatacaaattttgtttaggcattgcaatataatctttaaaacgtcctggcatcggtttccataacgtatgcaccaacccaagtatcgcataacaatcattaatagaattgacaataacacgtatcgccaacaaatcaaaaatttgatcaaattgttttttctgcttcatcattttccgataaatactgtaaatatgtttaggtctaccatttatatcgccttcgatattcattcggtccatttcagtacgtattctatcaatagccgtttcgatatacgcttcacgttcactacgtttcttcttcattaaattgactattctaaaatattgcacattatcaatataacgaagagccgtatcttctagttcccatttaattgtattaataccaagacgatgtgctaaaggtgcataaatttctaatgtttctcgagaaattctaatttgtttttcacgcggcatggctttcaaggtacgcatattatgtaatctgtctgctaatttcaccaaaattacgcgtacatctttggcaatcgcaataaataacttgcgatgattttcagcttgttgttcttcttttgagcggtattttacttttttaagcttcgtcacaccatcaacaattcgagcaacttcttcattgaacatttcttttacatcttcaaatgtatacggtgtatcttcaattacatcatgcaaaaaacctgcgacaatcgtcggtccgtctaatcgcatttctgttaaaatacctgcaacttgtataggatgcataatgtatggtaatccgttttttcggaactgacctttatgtgcttcataagcaatatgatagctttttaaaacatactcatattcatctgctgacaaatatgattttgctttgtgaagaacttcatctgcactatatggatattcgttgttcattatatgatacaccccattcatatttattacttcgccttaaacaatgatttaggtactcttgttgaatagtatttgtcccacaccaatcatacgtccgtcgacgataaatatttatcctgtcgtcattaatcgtaatattaattttacttgagcgagtttaatttgtatactattcctacttttaaaacttttacaaaaattcgacctaaatctactgtttcattttttaaatattagttctatgatactacaatttatgaaataaataaacgatgttattaaggtataatgctcaatcatctaacattttcagtaaataaaaaatcctaacatctcatgttaagaaaacttaaacaacttttttaattaagtcattggttcttatacatttgatgaaggatttcatttgataaaattatattatttattattcgtcgtatgagattaaactcataacatcgtaatctttaattttttcaataccatttaaatatttcaattcaattataaatgcaatacctactacgataccgcctaatttttcaactaattttattgctgcttcaatcgtaccaccagtagctaataaatcatctgtaattaacacacgttgacctggtttaattgcatctttgtgcattgttaaaacatttgtaccatattctaggtcatactcataacgaatgacttcacgaggtaatttcccttcttttctaacaggtgcaaagccaatccccattgaataagctacaggacagccaatgataaagccacgcgcttcaggtcctacaacgatatcaacatctctgtcttttgcgtattctactattttatctgttgcatagccatatgcttcaccattatccataattgtagtaatatccttgaaactaacacctggtttcggccaatcttgaacttctgatacgtattgctttaaatccattaatatttcctcctaaattgctcacgacaattgtgactttatccaattttttatttctgaaaaatcttgatataataattgcttttcaacatccatacgttgttgtcttaattgatatactttgctggaatcaatcgatcttttatcaggttgttgattgattcgaattaaaccatcttcttgtgttacaaattttaagtctaagaaaactttcaacatgaatttaagtgtatctggtttcacacttaaatgttgacacaataacataccctctttctggatatttgtttcttgtttagttattaatgctttataacactttttaaaaatatccatattaggtataccatcgaagtaaatcgaatgattatgttgcaaaactatataaagttgagaaaattgcagttgttgcaaggaattagacaagtcttccattgacgttggtaaatctcttaatactactttatcagtttgttgtttaatttcttcaccataataatattcattcgcatttactttatcacttttaggatgaataagcacgacaatattttcatcattttctgtaaaaggtaaactttttcgcttacttctataatctaatatttgctgttcattcatcgcaatatcttgaataattaattgcggtgattgattaccattccattcgttgatttgaacagatcctaatatattaattggctgttcatcttgtaactcaggttctaagtgaccattttgccaaaatagcgcggcgatattactttcaccaagtgtcaattttagatgatttttttgttgacctatcgccttaactgaagaaactgataaatcatccatttcaaaaataggtctagaaaaatctgttccgaagggtcttaaacgattcatatcacgaatatttttaatcgttatatcattttctgttaataatacatctacttgctttacgggatctaacgaagttgttttagataattctttcatccatttatttaaaccttcagctaacgattctatattttcaatatccatcgtcatacctgcagccatatgatggccgccaaatttagcgattaactcttgatgtgctgatagtatttcaaacatcgacacttgatcaattgatctggcggaaccttttgcatgattttgctccctatcaatatttaaaattaatgttggcaaagcaaatgtttcgacaattttcgaagcaacaatacctaagacaccttcatgccaattttcttttgctaaaagtaaaaataaatctccctttttaactttcgtttctgccatagccattgcttcttctgtgatagttgctacaatatcttttctttcacggttaaaatgttcaacttgttctgctaaaaatgcagcttcttcttcgtcagtcatcaacaattcgcaagctaatgatgcgtcatctaaacgacctacagcattaagtctaggtccaataataaaaccaattgtttcttcatcaatattgtcattgtatcccgcttcttttagcaatgctttaacagaggtcggacattgatcattcaagacttttaatccttgtttcactaatgatcgattttcatcagttaaggatactaaatccgcaatggtacctatcgcaactaatgctttaaaataatcaggtacattttcaatcaatgcttgtgctaatttatacgcaacacctgcaccacacaattgttggaacggataattaaacgatggatgcattggatgtacgattgcatatgcttctggtaatgtactaccaatttcatgatgatcagttacaatgacatcaactcctaaatcttgaaccattttaatttcattatgaccttgtatgccattatcaacagttatgattaatgttatgccttcatcatgagcatttctaaatgctagttcgtttggtccatatccttcggtaaagcggttaggaatatgccatcctacttgtgcacctaaaagttgtaatgttgtcactaaaattgtagttgaggtaacaccgtcggcatcgtaatcaccataaactaggattttctcatcattcgctatcgctcttttaattctttcaatagtcttagtcatatcgctcaattgcagtgcatcatgattgatatctgtatctgaaatgatggattctattgcttgttcatcaataatcgatttactttctaatattttttttacgattggcgttaactttaattttgatgttaattcatcacttatgtattcagctggtttagttaatttccacttatacttcggtttaatcatatatatttacgcctcatttccaaaagacattatatctaaaattactttaaataaaaagcacttatctaaataatcaagactttaattataccattttttaaaaatgaatgcgggaacttatttatatatattttgttaaatttaaataaagtaaaaagcggtatgtgaactctttattgtttcacataccgcttaattcattttaaactaaaatcttttcatcgttcgatttcttttctttatatacaactaatttgtgtttcggcgattttttcaactgacgttttttcattattccccatagcggaacggcaatgaagattgaagagaatacaccagaaatcaatccgataaataatgctaaagtaaagttgaatatcgtaggagcaccgaagaatagtatagcaactactactacaataactgttaatactgtattaattgaacgcgtcattgtctgtctaattgatctattaacgatatcatcaatttgttctgttgtcgtaatcactttaaccttttgtaagttttcacgtacacggtcaaacgttacgattgtatcattaattgaataaccgacaattgttaatacagcggcgataaatgttaaatctacttcaattctaaataaactgaaaatcgctactataatgaatacatcatgtaataatgccaatacagatgaaagacccatgcgccattcaaatcgtaatgatacatagatgatgatacctatcgatgcatagattaatgcaagcattgcattttttgctaattcctgtccaataattggtgatacagtattaatttgaggtgtgtcaccgaatttcgatttaatattatcactcaatttattatcttgagcacgcgttaaatcgtctttaaattgaacagttgctactttattatctttaccattgatttgaatttgatccgctttaagtccactatcttttacaacttgctcaaccttttgttgagtaattgcttgtttagattggaaatctacacgtgtaccacttgagaaatcaattcctaagtttaacttgaagatataaagaataactaaaccgacaactacaattaaaatacttactccaattaatggcttagctaatttaacaaaattccatttctcgaatgaagttttaaggtcatgaacatctacaccttcattaatatcatgtcgtttattctttttaacaccaaataaccaaaattgatttttgaatatatttgatgaaacaagtaatgataataagaatcttgataagaacacggctgtaacaaagatcattagaatacctaataataacattgtcgcgaaacctttaactgaactttcaccgaagaagaataatactgctgcggcgataactgttgttaagttagaatcaaaaattgttaggaatgaacttttgtttgctttagaaaaggcttgctttatcgttctacctattcgaagttcatccttaatacgctcatacatgataatattggcatctacagccatacctacacctaataccaacgccgctaatcctggtaaagttagaaccccggaaatgaaattaaatgctactaacgttagatagatataagttgtcaatgcaataatcgctactaaaccaggtaatcggtagaatccaagcatgaataaataaattaatgctacaccaataaacgatgcaaacacagttttatctaatgcatcttgaccaaattgggcacctactgagtttgaataaatttctttcaagtcaactggtaaagaacctgcatttaacaattcggcgatttgttttgcttttttaacgccttcttgtcctttaaatccacccgagatttctacgctatcagaattgattggttgatcaacacttgctgcagaaataaatttagggtttttcttttgtgcttcttttttatagctgtcaccttttttgaaatctaaccaaacaaccatgacattatcacgtttcttagagatttcttccgttacttttttaaatttgtttttgtcttttactttaaaagtaactgtaggctggtttgtttcctgtttaaattcttgtttggcagatccctgtttaatatcagaaccgcttaattttactttatcttctgcatcgcgaattgttaaattagcttgagaagataaaattttacgtgcttcattctggtctgttacaccagcaagttgtactctaattctattaggttcttcaacttgaattttaggttccgaaacacctaaaacgttaacacgattttctaatgtttgcgctgttgattgtaaggcttttttatctattttgtcgcctttatttaaaggatcgacttgataaagcacctcaaatccaccttgcaaatcaagtcctaaattgacattctttataacacttttataagttgcagccattccggcaaacaacaatacgactaaaagcaagaacgcaattattctactacttttcttcacatgaacacctcattatttacgtatgtatttagaatacttgaatactattttataacgcaagttaaatctttcttacaaaatttattagccttatacatattaacatactagagcagggagtaaaaatagtcatagatatatttaatttaaatttaacaattattatgtatcacaatttctttttctggaataaaaataagctattctacatactacttataacttaaaaaggatgaaacgctattcgtttcatcctttttaataccacttctcattatgaagggtcaacttgtttaatagcaggtttttcgaaagttaattcagtaccatgaccattaactgtaataacaacagttgtttcatctactgctttaacagtacctttaataccaccaatagttgtaattctttgaccagattgaatgttattaatcaactcacgatgctgtttcgcacgtttttgttgtggtctgatcatcaagaaatacataaccgcaaaaattacgactatatatattagtaatgaaaattgcattttatacgctcctcttgcttaaaagttttttgggttctcaacatttaatccatattgctcgaagaattcttctttgaaatctaaaagacgatcttctcgaatggcttgtcttatatcttccattaattttagcagaaaatgtaaattatgaatagtagtaagacgaataccaaaagtttcctctgccttgattaaatgacgtatatacgctcttgaatagttttgacatgtataacagtcacaattctcatctaacggtcttaaatcatctgcaaattttgcatttttaataactaaacgaccttgcgatgtcatacaagtaccatttctggcaatacgtgtcggtaagacacaatcaaacatatccatgccgcgaatactacattcgattaacgcatctggagatcctacacccattaaatatcttggtttatctttaggcataaactgctctgtatgttcaaccattttatacataaccggtttaggttcaccaactgacaaaccgccgattgcataaccaggaaaatctaattctactaaatcctttgcactttgttctcttaaatcttcatattcgccaccttgtataatgccgaacaatgcttgatcttcaggtctttgttgtgcatctagacatcttttcgcccaacgtgttgtacgttcaatagatttttttacataatcatattcagcaggcatcggtggacattcatcaaatgccatcataatatcagatcctaaatcattttgaatttgcattgatttctcaggactcaaaaataatttagacccattagtatgatgtctaaattccacgccttcttctgtaattttacgtaaattacttaaactaaacacttggaaaccgcctgaatctgtaagaatcggaccatcccaattcatgaatttatgtaatcccccagcgtgtttgataatatcatttccgggttgtaaccacaaatgatatgtgttgcccaaaatgatttttgcttcaatttgtcttaactcttctggactcattgttttaacggttgctttagtaccaactggcataaacataggtgtttcaaatgaaccgtgtggtgtgtgcacgatacctaaacgcgcacctgattgtttacaagttttaatgtgttcatatgttactgcaggcatattcaaaatcctcacattctttttatataattaacattgcatcgccaaaactaaagaatctatattctaaatttactgccgttttataagcattcagaacattttcacgagtactaaacgctgatactagcataactaatgttgattttggcaaatgaaaattagtaatctggccatcaattgctttaaaatcaaatcctggataaataaatatattagtccagccactcgtttcaacaaatttatcatgatcgcgtcgaattgtttcaagtgtacgtgttgaagttgtaccaactgatataatgcgatgtcctttggacttagtatcatttaataaatcagctgtttcttgtgtcatttgataatattcactatgcatttcgtggtcattcacatcatcgacgctcaccggtctaaacgtacctaacccaacatgtaatgtaacaaatgcgatattaacacctttatttttaatttcagttaataactcatcagtaaaatgtaatcctgctgttggtgctgccgctgaaccactttctttagcgtaaactgtttgataacgatctggatcatctaaacgttctttgatgtatggtggcagtggcatttcccctaattcatctaatctttcttgtaaaataccttcataatgtaaacgcatgatgcgtccaccttgatccatttcttttatgcattcagctataattttgccattaccaaaattcaatttattaccaactttaatacgcttagctggtttcagtaagacttcccaatcattaccttcaatttgagttagcattaacatttcaacttttgcaccagtttcttcttttaaaccaaaaagtctagctggcattactcgcgtatcgttaagcactaatgtatcaccaggtctaaaatactcaatgatatctttgaaatgtaaatgtttcatttcaccagtttctctatccatgactaataaacgactatgatcacgatcttttaaaggcgtttgagcaattaatgattctggtaagtcatagtcaaattcttcaatattcacgttattctctctcctcattcgactttgcaaaatgttcataagctaatggtgttgcttttctgccacgtggcgtacgttctaaaaagcctttctgaataagaaatggctcataaacgtcctcaattgtaatacgctcttcaccaattgttacggcaatcgtatctaaaccaacaggtccaccattatactgcttaataatacagttcatcattttatgatcaatgtaatctagtccgtgttgatcaacttgaagtaaacctaatgcgtgcttcgttgtttcaatgtatatttgttcatcttcattcacttgctggaagtctcttacccgcttcaatagtcgatttgctactcttggagtccctctagaacgtttagcaagttcaatggcactttcttcatcaatacctgtgcctaaaacctcagctgttctaataatgatttcttttaaatctgattcattataatattctaatcttaagtgcacaccaaatcgatcccttagtggacctgttaagctgccagctcgcgttgttgcacctaccaaagtgaatggaggtaagtcgatacggatacttctagcctcatcgcctttaccaatgataatatctaaaaagaaatcttccattgcagggtataacacttcttcaacaacactactcagtctgtgtatttcatcaataaacaaaacatctccaggttgaagtcctgataaaattgcagccaaatcaccaggtctttctaatgaaggccctgatactgtacgtatattaacttccatttcattggcaatgatattagataatgttgtcttacctaatccaggggggccaaaaagcaatacatgatctaatggttcatgacgaagtttagccgctttaataaatacttctaaattactttttattgaattttgaccaatatattgtcgtaatctcgtaggtctaagcgacaattcgaaatcagtttcttcactatgcattgattgatcaaccatacgctcattcatgacaacacttcccctattaatctatttaaaattaagatacaactaattgaagacctgccttaacagcttcatcaactgagtcatatttatttttatttaacgttttctcaacttttgcaagctctcgtttagaataacctaatgcttctaacgctaacattgcttcttgcacgaattgatcttgcaccgtcgaagtagcgtctacttgtaataatgaatcgctatcttcttcagtgattttcactttgccttttaaatctaagacaatctgtcttgccgttttcttaccaattcctgggaatttagttaaatacgtatcattttcattttcaatggcacgttttacttcattaggcgtacttgtcgctaaaatagctaaagctgatttcggaccaataccagtaactttaattaaactcaagaacatatctttctcttcttcactactaaatccatacaataattgtgcatcttcacgaacaattaaagatgtatgaattaaaacttcatgatctagatgcttttgaaaacgataagaatttggtgtttgaatttcataaccaacaccagcagtttcaacaactacgtgtgtaggatataaatgtgttaacttacctttgacatacgcgtacattataggcacatccttacatactcatactaattaattctacttttgatacataatctaaatttctcaaagcgccaataacatcttctactgaagtttctttagatttagcattcagtgataatgttattgttgctttttcttccattggaatactttgatgaatcgttaatacagatagttctaactttgatataacatctagtacacgtgccaacatacccacaatatcagttacatataaaattaatgtaaattctcgatggtcaagcattttatcgtctactggaaatatcgtttctctatatttataaaaagcacttctagatagatcaaactgtttaacggcatcataaatggacaatgtcggatcactttttaaggcatctttaatcttcaatgttttaaccacggattcaggcaagacatcttctctaattaaataaaactttttataatctttattgtccatcatgttacgctcctattcaacgaattcaaattctccgccaagaattctaacgatatcaccatttttacaaccacgttctctaagcgcatcatcaatacccatcgaacgcatttgacgagcaaatcgacgtactgctggatcactgttaaagtcagtcattttaaacattctttcaatagcattaccacttaccacataagcaccatcatcatctcttgaaattgtaaatttatcttgtgacggtgtatgtttatataatactcggttaatgccaactgactcctcttcttcaactgtgaagtcaacatctttatattcttctaatttatctgctattgtatataataattgatcaatattatcacgcgttattgttgaaactggaataactggcacatcttcgccaatttcttctttaaacaagtttaaattatcttgtgattcaggtaaatccatcttgttagctactacgatttgaggtctatcttctaaacgttgctcgtacgcggctaattcttgattaatgactttataatcttcaataggttctctaccttcagaaccactcatatcaatcatgtgaacaataacttttgttctctctacatgtcttaaaaattgatgtcctaatccaacgccatcagatgcaccttcaattaaacctggtaaatctgccataacaaaactacgttgatcaggtgttgaaacaacacctagatttggtttaatcgttgtaaaatgatatgccccaattttaggcttagcttttgaaacgatagataataaagtcgatttacccacactagggaaacctactaatcctacatcagctaataatttcaattctaaagatacatctaattcctcacctggttcacctttttcactgaagtcaggtgcagggtttctaggtgttgcaaaacgtgaattacctcggccacctcgaccgcccttcgctactacagctctttgaccatcttcaacaagatctgctaacacttcgtctgtttcaacatttttaataattgtaccaggtggaacttttaatactaaatcttccgcatttttaccatgcatattactactttggccattttcacctttgcttgctttaaaatgacgttgatatctaaaatctaataacgttcttaaaccttcatccacttcaaatacgactgaagcacctttaccaccgtcaccgccagctggtccaccaaatggtacatatttttctcttctgtatgcggtaataccattaccaccatcaccggctttaagagatattttgacttgatcgacaaacatatatctcacctcttttacatataattttcattttcccaataattatagcatattagagccccttatagtttagcgattaggggctcttatgcagttgcttttataaatctttgctttaaaatacttatatttccgagtaccaaatatgatacttttttgctttttatactgcaactgtattcttttgtccccttatagtttagcgattaggggctcttatgcagttgcttttaagtttactttactcaaattgctgatatttccaagtaccaaacatgatacttttttgctttttatactgcaactgtaatccttttagccccttatatattgtaaataattaggggctcttatgcagttgcttttaaatttactttactcaaattgctgatatttccgagtaccaaatatgatactttttttgctttttatactgcaactgtaatccttttagccccttatatattgtaaataattaggggctcttatgcagttgcttttaaatttactttactcaaattgctgatatttccgagtaccaaatatgatactttttttgctttttatactgcaactgtattcttttgtccccttatagtttagcgattaggggctcttatgcagttgcttttataaatctttgctttaaaatacttatatttctcagcaccaattgtggtacagtttattctttaaacgctgcaactgtattcctttgtccccttatagtttagcgattaggggctcttatgcagttgcttttataaatctttgctttaaaatacttatatttctcagcaccaattgtggtacagtttattctttaaacgctgcaactgtattcctttgtcccccttatagtttagcgattaggggcacttatgcagttgcttttaagtttactttactcaaattgctgatatttccaagtaccaaatgtgatattttttgttttttatactgcaactgtaatccttttagccccttatagtttagcgattaggggctcttatacagttgcgcatttagtataacgtctaaaattccgattttttaataacataatgaaaataataatgaaaaacgttttataaaaagtaaaaaacaccagaagattcacttctggtgttaactagacaaaattattcagctactgcatatacagaaacttgttttttgtcgcgacctttacgttcgaatttaacaacgccgtcgattttagcgaataatgtatcatcgccaccacgacctacattttcaccagggtaaattttagtaccacgttggcgatataaaattgaaccacctgttacgaattgaccgtcagcacgtttagcacctaagcgttttgattcagagtcacgtccgttttttgtagaacttaccccttttttagatgcgaagaattgtaagtttaattttaacatcggaatgcacctcacttataatttaatctaatattctcattatattcttctttaatagtttgtaaagacacaagcattgtttgaagaattagttgcgcttcatcgttatttgtatcaacgcttcttatatgaaaatgaccaccattgtcgtcataattgatatctggtctctcagatgtcaatcctataatcgcattaacactaccaaacaatacagctgaagctccagcacaaacgatatcatgaccatattcaccatggtcagcatggccatccataataacgtctgttactttgccttcatcattaactgtaatatcaacagtaatcataataattacgcgttgattttatcgattgttaatttagtgtatggttgacgatggccttttttacgttttgaatttttacgacgtttgtatgtgaatacagtaatttttttaccgcgaccttgtttattaacagtagcagtaactgttgcaccttcaactgttggcgctccaactttaactgaatctccacctacaaataatactttatcaaatgtaaaagtatctccttcgtttacgtctaatttttcaacgaagatttcttgaccttcttctactttgatttgttttccacctgtttcaataatagcaaacatactttgcacctcctgtataataagtcacgccatacataggtgacatttcgttattgagtcaagcgtttgcactctacgttgtttcggtcgcaactcgagtcatttataaacataaactcttctcgtttcttccttcaacgccttgattgacaatcgctttctttcaataacttctgcaaataagtcaagcgtttgcactctacgttgtttcggtcgcaactcgagtcatttataaacataaactcttctcgtttcttccttcaacgccttgattgacaatcgctttcttcattaaaaatgttcttgaacctatatttgagcggttgtatgtagctacttataactactcaactattgcatcttaccattgacgacgtttcatgtcaatgtcattgtttgtttttttaaggaactttataatcaacggataaagcataatcaacagtacaaaattcataattaatgttggcaataatctaaagactacaaaatgaataatatcaaattgaatgaatcctaacataccgtatattaatgccacatagacttctaataataaggtgctggctaatataataatgaataacatcgaatgatctttgtaaaaaattttaaagaatcgatctataagtgctaaaaacaatatatagccaaataagtacactccataaatactaccaaagtatacatcagtcattacgcctaaaaatatgctgagcaataatgatacgccaaagccacgatacactaccatcattaaaatatacataaatgtaaggtgtggtacaaatacaagttcaaacttacctatgtgcattggaataagaagcccaattgcagtatctatataaaatagtaaaatacctatcaaaaaataatacagtgtacgcattatttatccctgctttcatcatcaggaattgttttaggatctctttttgcaacataaacatgactcaaatctgttaagtctgcaccagtcttaaccctaacttctttagctaagccgtattgatcattttgaaccttagtcacttctcctatatataaattacttggtagttgatcagctaatccacttgtaacgactttatcaccttttgagatattatctctattattaatgtcactaattacaagttctgagttcttttcatcataacgatcaattaaaccaaatatatttttagaaccgtgttgtatatttacagataatttacccgcacgtgtattagttgagattaaatcaacttgtgaagaaaatttattaactttagtaactcttccaacaaaaccttgtgatgtcatcacagccatatttgaagttatacctgatttagatcccttatcaattacaattgtattcatccactgatccggatttcttgctaaaactgtagtagaaataggatcaaattttgaaatatcttttaaatcaagctctttttttaatttttcattttccgcttctaattgttggttcttagattctaactggctaatcttatttttagattctttagaatctccttttttaaaaaagtccccaatcgtaccagcaacaaaattaactggataactcacaactcgttgtccaaaagacacagaatcacctatatattgttcaggaggtgattgagattgtgaacgtatggacagcccaattaatgcaataaaaacgataattgcacataaaacaacaattaatttgttatttttaaaaaacttaagcacccagaacacctctattatgtcaaaatattgtatatccttttctattttatattactcccattatgaaataaagcactaactacgaattactttgaaaatgaacaactccgtaaaaaatttgtggcattttaaaaacaaaaaaactactagcaaacattccagtcactagtagtttaaataatcgatttaaattttaaaattatttgtttgtatcgttcgaggattcactgttcgaattctgaagttgtctccaacgtgcgaataagttctgggccttttgttgttcattagcttgtttctgttttgattgttctgccatttgaactacaccaaccttttaaatttattctagtgacaggataactaaaatatatttcttatgcaataatttcctattgataagcattttcaggttttagttgtaaattttgccctaattcatttaagtcttgttgcatttcaaattcagtattgtaaacacgcattgactcatctccaaatttataaagaataaattcatctcctctttgacctataatatattgatcattataagccatgcgattcattccagacacagccataaactcttgtttatctatcattttaaatacatttttaatttggcttaatggtacattctttattaaatcattttcttttaatgaatatttctcaccacttacataaacatgttgggcatcattagtgggttgcgtaacttgattcatttgatcattatcgtgatttacaggattccaatcttgttcttttaaaaaaggtgcgtatttcaaggcgatataaacaattatcacaattgctattactgctataatgtttttaatcatactaaatatcaatctcatagttcgcctccaatgtcttcatctaattatatattttattatgtatattttcctcagtcttcagccttaatcatgatatatcttaggactgatgcacgttcatttaaaatagcttataattttgttatgatttaaaagcgtattaggaggtttgtagcattgagtatactaacaattattttaatagcactattagtcatcctcctttttagagttggactttctattttgcgatttttaatttatgtcggacttgttttattatgtatttacttaggatatcaaggtttaatttggttgctcgatttttttcaaataaatagtggatttttaccgcactttcaatttaacaattaaatttattctgcataacaaaactcctaatgtactagtttagaattttttaactagttccacattaggagttttaatttgttttcaagcacggatactacttgatgaacagattactattacttacgcccaaatgcgttagataaaaatcgtatcagcgcgtagctaccacttagtaaaaggccccaaacgattccagtaaaaattgagccaattgctacacttaataaaggaaaagcttgtttcgtaacgatcacacctgctaacgccgttactaaaatacctaacgtagataaagctaatgttattaatagattgcgctttgttacaggttcatttttaatatttaactgcatggtataaaccattggcacgagaaccccgataataataaatagagtcactatttttcctccaatgaaagtacttcgtaggtattatacacaagatacgtcattaattctatcaacttcaatcattttcatcaaagtaacctgcttctacaagactggtaaatctattatcaccgattataatatgatccaataaatctatccctaaaatcaaaccacactccttcaacctcattgttgttatgatatcttcttgtgagggcgttacatcaccggatggatgattatgaactgcgatgattgcattggcattttctctcaccgcaatactaaaaatttcacgtggatgtacaatcgaactatttaatgtacctttaaaaacacaggtttctttaatcactacattttttgaatttaacaataaaatgacaaaatgttcttgtgttaaatctttcattgttggaatcatataatcagcaacatcacttggttgcgttatttttatacgattattttcagctcttctccccatcctttcccctagctcaaatgctgcttttaaagtaattgctttttgtaatccaatccctttaacttgtatcaaatcgttaattgaagattttttcaattcattcagattcgaagcagatttaagcagttcattactaatgtctatgctcgagaatccttttcttccggtgttaattaatatagctaataattctgtattcgaaagactttttgcaccatggcttaacaaacgttctcttggcatttctgaagttaccatttctttaattttcaaaaatatacgcctcctaaaaattgatggatatcattataaaaaagtgaattgataaaaaaggaaataaatataaatggaacaaggggtaatagtttaatcggcttaaatatcatggtaattaaagcaactaaaccagcaatgacaaatgtaaataaaatgacatatatagtgaattggagagggaaaaacaaagaaagtgcagatattagtaaaacgtcaccataaccaatatatgcccgaaataaaaagtagaatatatgcgtggtcatactaataatgataaaagctactggataaatcatacttaacgagagagaaacgatacaataaattataattaagcgacaatctaacattaaagaagtgatatcggtcatagtaaaaataagcagaaaaacatatgtagttataaatagcgtagcatttacgtatgtgaaatcatgcttaataaaggcgataggtattaaagcaaaggtttcccctaagaaatgtgttagggaaatacgctttcgacagtttcgacatcgcccttttaataataaaaaactaataatcggcattaattcataccatttgagtgatgaattacaataatcacatttcgatcttctatgtaaataatcaaatgacgtttcttctatagatataaattgatataaaaaactaaagatacaactgcaactataagataacaatactaccaaatgacaacctccttacgtaaagtatagttacttattaccgaaatgtaaatatacactatttttcaagaattgaacctctttttcatttaaatttttcaatattgctaagcataattgatggatactttaacagcccattactgctcggcaaaattaataatggcaagaaattgaaccttataaacacatacgatttagagcataaaaaataaccatgaagctctacctattgattaaatagattcttcatggctattttagttttataatgcttcaaagtctaattttgatttaacttcacttatgaaatacagactaccggtaattactaatgtatcaccttgataattttttataaattcaacgtagtcatctactaattgtatttcatcattttcaatactacctacaatttcttctttgcgtaacgctttcggaaaatcaaattcagttgcataaaacgtatgcgcaattaaacttaaatgtttgaccatctcgttaatcggttttccgtttattgctgagaacaaaatatctactttttctttatcatggtactgtttaattgtatcaattagagcatctatactctctgaattatgtgcgccatccaaaatgattaaaggtttgtcatgcacctgctcaatacgtccagtccaacgaactgattcaataccgtctatcatcttattgaaatctaattcaattaatccttgttcatttaattcaataagagctgttatggctaatgcagcattttgtttctgatgttcacctaacatacttaaaatgattgtttctaattcataatctttataacggtaagtaaattcatcattttgcgatacaacaacaatttctctatctaattcaattggctttgcatgttgttcaattgcgcgttcacgaacatattttaatgcatcttcatttttaacagcatatatcactggaacgttaggctttataatcgcgcctttatccctagcaatatctagataagtaccacctaaaatatctgtatggtctagaccgatactagttaagattgataaaaccggtgtaaagacatttgtcgaatcgttctttatacccaatccagcctcaacaatgacaaaatcaacaggatgtatttcaccaaaatataaaaacatcatcgctgtgattatttcgaattcagttgcaacacctaaatctgtttcacgttccatcatttcacttactggtttaatacgtgatactaattctacaatagcgtcatttgatattggcacaccatttagactaattcgttcattaaatgtttcaataaacggcgacgtaaatgtacctacttcataaccattttcaactaaagctgttctaaggtaagcaactgtagatcctttaccatttgtgccacctacatgaatacccttaatgttattttgaggattattaaattgtgctagcatccattccatacgtttaacacctggtttgatgccaaatttagttctttcgtgtatccaatacaagctctctaggtaattcattgttactaactcctatgcttttaattgttcaattcttgccttcacaccatcatatttttcttgataatcttgttttttacgtttttcttcatttataaccttttcaggtgctttacttacaaagttttcattagagagctttttatctactctatctaattcgctttgaagtttagctaattctttttccaaacggctgatttccttatccatatcaattagcccttctaatggtaataccactttacctgcaattacaactgatgtcattgctttctcaggaatttccacgtcagtgctaatatttaaggtactaggattacagaatttgattaaataatctttgttttgtgataaagttgtttcaatttctttatctttagcttgaattaaaataggtatttctttagacaatggcgtatttacttctacacgtgattgtcttacagatttaataatttcaacaagttgttgcattgtttgtttactttcttcaaaaatcaatgattcacgcacttctggccatgaagctttaacaattgtgtcaccttcatgtggtaaactttgccatattttctctgttacaaatggcatgaatggatgtagcattctcataatattgtctaaagtataactcaatactgaacgtgtaacttgtttttgttcttcatcattactattcattggaattttactcatttcaatgtaccaatcacagaaatcatcccaaatgaaattatataatgcacgtccaacttcgccgaattcatatttgtcacttagatcagtaactgttgcaatcgtttcatttaaacgtgttagaatccatttatctgctaatgataagttaccacttaaatcgatatcttcaactttaaagtcttcaccgatattcattaaactgaaacgtgccccattccagattttattgataaagttccacactgactcaactttttcagttgagtatcttaaatcatgtcctggagatgaacctgttgctaagaagtaacgcaagctatcagcaccgtattcgtcaataacatccattggatccacaccattacctaatgatttactcatcttacgcccgtcttcagcacgaactaaaccgtgtaataatacatcattaaatggacgacgatctgtaaattctaagccttggaatatcatgcgtgctacccagaaaaagataatatcgtaacctgtaactaaggcatttgttgggtagtatcgtttaaagtcttcactttctaaatcaggccaacctaacgtagagaaaggccataaagcacttgagaaccacgtatctaatacatcttcatcttgttgccaattttcaatatcagttggcgcttcttctccaacatatatttcgcctgtttctttatgataccaagccggaatttgatgaccccaccataattgtcttgaaatcgtccaatctctaatattttccatccattggttaaatgtatgttcgaaacgttgcggataaaaatcaatacgatcatctgttttttggttatctaatgaacgtttcgctaagtcttccatgcgcacaaaccattgtgttgataaatatggttcaacaacagcgccagatcgttctgaatgacctacagaatgaacatgatcttcaatcttgataactaaatcttgttcttttaaatctttaactagctgtttacgacaatcaaaacggtccataccttcatatttacccgctttgtcgttcattttaccattttcatccataacgataatattttctaattgatgtctttgaccaatttcaaaatcattagggtcatgtgctggtgtcactttcatagcaccagaaccgaagtctatatcaacatactcatctgctaaaataggcagttcgcgtcctacgattggtaatataacagttttaccgattacatctttgtatcgttcgtcattagggttaacaacaatcgctgtatcacctaacatcgtttctggtcttgttgttgcaatttcaataaaaccttcaccatcagcgtaaggatatttaaaatgataaaacgcaccttgaacatcttcatgtattacttcaatatcagataaagctgtacgtgctttaggatcccaatttataatacgttcgccacgataaataattcctttattgtataaatcaacaaaaacttttttaactgctttacttaaaccttcatctaaagtaaaacgttctctactataatctaaacctagacctaatttagcccattgcgcacgaataaatgacgcatactcttctttccaatcccatgcctgttctaaaaacttttcacgaccaagatcatatctagttattccttgttcatttaatttagcttctacctttgcctgtgtcgcaataccagcatgatccatacctggtaagtataacgtatcgtatccttgcatacgtttcatacgtgtaatgatatcttgtaaagtcgtatcccatgcatgtcctaaatgtaatttaccagttacatttggtggcgggataacaattgtatatgtttcttttgatttatcttctgacggtttaaaataaccattctttacccattcttcataacgtcccgcttcaacttcacgaggatcatattttggtttcatttccatttgatatacctcctaaaaaaataaaaatatccatcctatatacaaataggacggatattccgtggtaccacctatattcaagaaggatgattaatatcaaattcactcttttaacataattggaataatcataccaatactatcatcgtgaaatttgaaatgcttcatctcttcaagcactctagattatgattaacgctcaaacacgtcttagcctactattaatcacgttcagctaagatactctgtgggctaccttcagtaaaaatcatttacatactcacaccaaatcatatgctctctttaaaataatttgaacttactcttcccaaatcctatattaaactcttaacttatagtataatgattgacaaaataagtcaatgtataggtgggaataaaatgaatgaatgcgcatttggtactaaagatccagtctacttaaactatcatgatcatgtatggggacaaccgctctatgatagcaaggcattgtttaaacttttagcattagaatcacaacatgctgggctatcttggttaactattttaaaaaagaaagaagcctatgaagaagcattttatgatttcgaaccagaaaaggtagcacaaatgaccgctcaagatatcgaccgcttaatgacttttccaaatatcgttcatcatcgtaaaaaattagaagcaattgttaatcaagctcaagggtatttaaaaattgaacaagcatatggtagttttagtaaatttttatggtcttatgtaaatggtaagcctaaagatttgcagtatgaacatgcttctgatcgtatcacagttgatgatactgcaacacaactatctaaagatttaaaacaatacgggtttaaatttttaggtccagtaacagtattttcgtttttagaagcagctggtttatatgatgcacatttaaaagattgtccatcaaagcctaaacacaattaatttgctatagcatcataaagtaaacgagacatcatctatttttaactaatagactgtctcgttttttgatgtgaaaatttattcaaatcataagttaaagttccaagttaatgcactgctaatattagatatcttaatctaaaaatagatgtacaacctttgcttaaaccttaataatgaattctatcctaagcataaatcaacttaaatggatgatagtttctaatcttcacgcttattcgaacgatattttaaaaagtaattaattcctggtgcaataataaataggatgaaaaagattcggaaaatatgataactcgtaatcatagcaacatcggcaccagtagctaatgcaactaaaactatctgattaacccctcctggtgctgcaccaagaaacaattcattaataggattattatcaaagaaatgtatgacataaaccatgattagcgcaccaattatcaacataatattttgaattgtaattgcgattgctagtctaccttttaaatctgacaataaatgcgcaatttgaactccaattctaatcatatatattagttgtgccatgttcaacaaccaatgatctagtgtaaatgttaaacctgtagaaaaattccaaacaattaatacaatgagtggtgctaataattgaaatgttggaaactttattttagacataattagataaactataaagatagctatcgctaaaataactatttgccctatgtttaatacttgtgataaaggcaagacttttgttaactttccattcgcatgcatgttaccatcatgaaaaaaatatgaaatgaacggtactaaaacaacaacaaatataattcgtgatgtttgcgttaagctaacaactaacaaattagcacgtttgtcttgttcagccatgaccagcatttgtgttagtgctcctggtataacacttaaaatagctgtttctgtattaatacgtgcaatttttttaaaaataaatgccattactattgcaattaataatatcgaaatagatacaacaataatcgaaagccaattgtctttaatatccataacgacatttttcgtaaacgttgatccgatttgcacacctaatagtacaatacctaattcactaagtaagaatggccatttaatatcaagtttgaaaacttttacacaaatgattgatgcgataataggaccaaacataaatgggagtaatacgtgcgatgaatacaatataatactaataaaaaatgataaaacgaacacaatgaaattatttctatatatcattgtcatgttttccacttctttcaataaaaaataaaatgactaaattgctgcttgagcttcacgtttgttaagataacaatatccgctagcagttttgactacaaagcatatatggactttcactatcaagtcgccgcccatgcctgatatacatttaaaaagagcctgaacaaagttcaggctctcaatttgtccgtatatttattttacaatacgacttaaagccgtatcaaatgcttgaatcgttttttcaatatcttctttcgtgtgtgccgtagataagaatgtaccttcaaattgagatggtggtaaaaacacaccttcttttgccatttctcgatacatttctgcaaataatttcaaatcacttttattcgcttgttcaaaattagttacaggtccttcatttaagaaataaccaatcattgaacctgctctatttacagttattggtacattgtgtttagcaaatacacgctttaaaccgtcttcaagtatatcgcctaacatattaaaatactcatatgtctctggcgttaattggcttaacgtttcataaccacttgtcattgcaagaggatttcctgataacgtacccgcttgataaatatttcctaatggtgctatatgatccatgatttcttttttaccaccaaaagcacctacaggtagtcctccaccgataacttttcctaagcaagttaaatctggtgtcacaccaaagtaaccttgtgcacaatgataaccgactctgaaaccagtcattacttcatcgaaaattagcaatgcgccgtattcagtcgtaatatctcttaatccctgtaaaaaaccttcaatcggtggtacgacacccatattaccagcaacaggttctacgattacaccagcaatatcgtctccaaatttttcgaaagcgattttaagtgcatctaaatcattgtatggaactgtaattgtatttttagcaataccttcaggcacaccaggagaatccggcaatcctaatgttgccaccccagaaccagctttgattaataacgaatcactatgaccatgatagcaaccttcaaatttcacaattttatttctgccagtataaccacgtgctaatcttaaagtatccaatgtagcttctgtaccagatgacaccatacgcactttttctattgaaggtactcggtcaataacgagctgcgccaatttattttcaagtaatgttgatgcaccaaaacttgtacctttatcaattgcttcatgtaaatgactaataacttgagggtctctatgtcctaaaataagcggcccccaacttagtacatagtcgatatactcgttaccatcgatatcataaatttttgagcctttaccgtgatccataaaaattgctggtgtatctactgatttaaatgcgcgtactggactatttacaccaccaggcattaaagtttcagcaaccttcattgcttcttctgatttcgtatatctcataaagtaaattcctcctatagtttatggaaaatcatacatataaaaccttatttatctaaatagcgacaaatgtcctttgcaaaatacgtaataatcatatcagcacctgcacgtttcattgaaaccatttgttccataacgacacgttcttcatctatccaaccattttgtgccgctgctttagtcatactatattctccactcacattatatgcaacaactggaacattcgtatgatttttaacatctcgaactatgtctaaataacttagagcaggtttaacaatcatcatgtcgcacccttctttaagatcactttctaattcacgaagtgcttccaaacggttagcagggtccatctgatacgtttttctatccccaaatgatggcgctgaatctgctgcatctctaaaaggtccaaagaaacttgatgcatacttgacaccataactcattataggaatattgtaatagccggcttcatctaatccacgacgaatttcagcaacaaaaccatccatcatattacttggcgcaataatatcagcaccagcttccacttgagaaattgctgttttaacaagtagtggcaatgatttatcattgtcaacgtcatgtgtatggtcatcaatcacgccacaatgaccatgatcagtatattcacataaacaagtgtctgcaacaattaataagtcatcatacatttttttagcaatacgtgttgcctgttgaataacaccatcgtgaatgtatgcaccagtacctatatcatcttttgagtttggaacaccgaaaaacataatggcacgtatgcctaagtcataagcttcttttaattcactttcaagtaaattcaaactgatttggtatacacctggcaatgacttaatttcttttttcacatcgtctttttcaactacaaaaattggatatattaaatcttcttttcttacatgattctctctaaccatatctctcattgtcgctgatgatctcaatcttctatgtctatcaaatttcatttttagcccctactttctaaaatcttttcaattagtgattcgagtgtttgaatttctgcaattgttactggttgttgatatgatttaatggtccgtgctgtttgttctccaatagcaaaatacgacttgaattttggtacaaatccttcattaaaataataacgtactgccgacgaacttgaaaatgttaatgcatcgatttgttgatgttctatcatttctttaacatcttgtatattttgtttgttaggcactgaagtatataaatctattttaacaacttcattatctttagataacgctgctaataacaatggtctcgccaattcactcaaaggcaaaagtattttttggttagtttgattaaatgattttaaaaatccttcttgagaaaagtcgtttggcataaaatcaactcgaatgccaagtgattcacaatattgcgctgtcttacttcctatcacagcaatgttatcaacattaattccttttagatatttataaaagaatttcacagcatttttagatgaaaaaataagccagtcatagtgttgatttaacaaatgaatatcaaaatttagtggctttatatcaataaagggtttgtgaataattgatactaaatcactttgcatgtcatttgtttgtgtcataactacaactggcttcatatttaaacgtcactccattatttaatgttgttcatttaagcgttttataatttcataagcaccttgctcttttaatttgttactcactgttttgcctaactcaaccggatctgttccgttcattgtatattcaaatcgttctttaccatctggggtcataattaaacctgtaaattcgatttcgttttgatctgagattgtagcatatcctgcaattggcacctgacaactaccatccatttctgctaaaaacgttcgttcagcagtcacacattttgcaacctcatcattatgtactttgcttaataatgttaatagttcttcatcgtcactacgacattctatccctaaagcaccttgtccgattgcaggtaacaatgtatctctatcaagataagatgttacaatatcatctgaccagcccattcttcttaaaccagctgcagctaaaataatcgcatcataatcttcagtttgtaacttttctaatcgtgtatctatattacctctaatccatttaatctctaaattaggatacttagataatatttgtgcaccacgacgtaatgaactagtaccaataatactgccttctggcaattgggatagtggtgtatgtgttttagaaatatacgcatcaaaaggtaattctctatcagggatacaacctaatgttaaaccttccggaattacacttggtacgtctttaagcgagtgtattgccatatcgatatttttttcaaaaagttcatgttgtatttctttaacaaataagcctttgcctccgactttagacaattgtttatctactatacgatcgcctttcgtgacaatttctttaatttcaatttctagatttggctcgacagcttttaatttatcaataaattgctggctttgtgttaaagctaatttacttcttctggagccaacgactaatttacgcatgttcaattcctcctaggaacggattgctctagattattttctcaattcacaaaatgtgttgcaaaaaataaattaatcatatttaagcaaaataaaataatgttatagtatattaaatatcttgaattcaaccatttgttgattctaagtaaaatataacttccatataatactgtaataattgaagagagtattaccttcgggtcaatgaatatacgttcaccaactgaaattacaccccactgtgtacctaaaataatactaaatatgagaattatccacccacttaacgttgagtaaaacacaattgattcaagtgtagcaacgctaccaattctaaagtatttttgatcaaaacgtttttccttcaaattacggtattgcatgatatacagtaatgcattgacaaaagctaaggcaaagaagacataacttaacacagctagaccgatatggactaacagtaactcgtctacaacagcaattttctgaaccttattagtataatgtgtcggttgaaatgtattcatccctaaaagtgttaaccctattaaattcaagaaaaacacagagaaattcaaaactttgataaggttaagaattaaagagattgaaataatcagccaacttaaagtatagaatacatctgaaatagaccctaatggaatatgtctagtttgtataataaaaatagataaagagattgtttgtaaaacccaaacaatccccaataaatatatgcctaaacttctaatcttatgacttttttgtacaaaatcataaaaatagcaaatgatactgattaagtatattaataatataatttcattgaatcgaataaacaggttttcttgcatattatcaccatattaatatgcttattcaaaactaaagatacgtcgcgctgaaatttccttgaccttgctttctttttgttgcttcgcttgctcatgaggacattcagcttcgatatcaaatatattttgaaatagctctaatttttcattacttttcttatcactacttaattctttggcctgtttaataggatctttcaacatttgattgatgatactttttgtatgtttagatataattttacgttctctttcgcttaaccctggcaatttacgatcaatactgtccatcgtttctgcttgaattgccatagctttttcacgtaaagctctaatcactggaacaacacccaacatactaatccactcattgtgtgcatgtatttctgcaggaatttgttccgaaattgttgcagccgctaattgtcgctcacgtaagtttgcatcaactaaaccttttaagtcatcaacatcataattaaagatgtttgtgatggcactaataccaggttcaatatctcgaggaactgcaatatcaatcaatactagtgaatcttgctttctattttctgcaattctttctatcatttcatttgtaatgatataagattgtgcactcgttgaactaatcacaatatctgcactttcaagtaaatttggtaatgatgatagttcatcatatttcacttgatgctttgctgctaatttcatagcattttcaattgttctatttactactgtaatatcagtaattccagaaccaagaagatttaatagtgataattcactcatttcccctgcaccaataatgatagcttgcttacttttcaatttgccaaatacttttttcgccaactcgaccgcagcataagacacacttacagcattatcagctatatctgtttcattatgtgctctttttgcaaaagtaattgcctgtttaaatagatgattaaaaattgttcctgtcgtacctgtgctttgcgctaagaaaaatgcatctcttatttgacctaaaatttgagtttctccaagtacgattgaatctaaaccagaagtgacacgcaataaatgttctactgcttcgtcccccacttttacttctgacattgctttaatatcatctacttcaaatccaaatgcacgagctagaaatcgttgaatatagtaacgacctgtgtgaatttgatcaacaacagcatatacttcagttcgattacatgttgataatatgacattttctaaaatagatttagtttcatataaatcttcatgggcaattcgtaaggcatcatctctaaaagcaacttgctctcttagtgcaacatcagctgtgcgatgatttatactaattgcaataaaatgcatttgaaacgcccccatatatactaacaatacaaatattataacataatttaaaatccaattaagtacgatgcttaaataaattataatctttctaatttacttttgagtttttgacaaaatgatgaacgttgaaaaatgttatcaattgtgtactaattaaaagtttcgtgcttacattatttttaaaatttttgtataagttttgtcgtacaaaaactatgaaatatacggttcaattaaattccatatttgttgttgtttattattttgaattgatgaataacttacaattgtatcgtctgggtccatatctaattgtgtcttaatatttttaatatgcttttgaactttaccttttggaattttgtcttctttagtgcatataactaaagtaggaatatcaaaatgtttcaaataattgtacattaagatatcatcttgtgttggatcatgtcttaaatcaactaattgaataactaattgcaaattctctctcttagttatatattcctcaatcattttcccaaatttttcacgttgtgttttacttactttagcatatccataccctggaacatccacaaaaataagttgttcatctatattataaaaatttaacgtttgcgttttgccgggttgctgtgatgtacgtgccatattttttctgccaatcatactattgataaatgtagacttacctacattagatcgaccgctcagtgcaacttcagacaattctgtttctggatattgttcttcttttactgcactaatgattaattctatattattaggattaactttcattttatatcctcacttttttatattctctttcaactctaccattatataatatttgaacctttcggtatacattataaaaaagctccgatcaaagttaaactatttgagcgtcaactttgattggagcttttcacttttataacacatcaatgattaagctgatgttttactattattaattaaattgccttctgcgtcgtatagttctggttcagtttcttcattaattgtttgtgctgtaataactaccttcgttacattttcgttagaaggcacatcaaacataatatcgattaacgattcttctatgattgaacgtaaaccacgcgcacctgtttttctttcaattgctttttcactaattgctgataaagcttcttcagtgaactctaaatccacatcatctaattccagcattttagtatattgtttcacaagtgcatttttaggttgcgttaagatgtttttcaacgcagttacatctaatgtttctaaattagctacaattggcacacgtccgataaattcaggaatcaaaccataggcttgcaaatcttctgggcgaatttgtgctaataatgcttgttcgtcatatttatcagcttcattgcttgagaaaccaataactttttcaccaagacggcgcttaatcacttcttcaataccatcaaaggcaccaccaagaataaataagatatttgttgtatcaatttgaatcatttcttggtttggatgtttgcgtccaccttgtggcggaacacttgcagtcgtaccttctaagattttaagcaatgcttgttgaacaccttcacctgaaacgtcacgtgttatagatgtgttttcagatttacgtgcaattttatcaatttcatctacataaataatacctttttcggctttatcaatgtcaaagtcagctgcttgaattaatctcaacaagatattttcaacatcatcgcctacataaccagcttcagttaaacttgtcgcatctgcaattgcaaatggtacattcaacgtcttggctaatgtttgagctaataatgttttaccactacctgttggcccaattaatgcaatgttacttttttgtaattcaacatcatcttcttttggtcctaattgttgaatacgcttatagtggttataaacagctacagctaaagattttttagctttttcttgaccaataacatattcgtttaaatgatccataatttctttaggagtaggtaattctgtcatcgcttcagaagtgttttgagctaattcttcttcgacgatttctgagcataattcaatacactcattacaaatatatacaccacttcctgctacaagtttttttacttgatcttggtcttttccgcagaaagagcatttcaaattttcttcatcttcattgaatttaaacattctttttacacccctattcgttaaagactatactagattggatattacaatgcaacatattaacatacaaactttttgcttaaagaatagtagcagatacataagctatgcatctgctactcatttttgtaatttaatatttaatgaagattaatcttctttagttccttcaacgaactttgcgttatctcttaataaatcgataactttttggatacgaacatcatttttaatgatatcagtattacctaaagtatttttgatatcttcaactgagatattaaattgtttactcattttttctaattctttatcgatatcttcatcagtagcttcgattttttcagcttcagcgatcgcagttaaagttaagttagttttaacacgttgttctgcatcgtctttcatttgctctcttaattgagtttcatcttgacctgagatttggaagtacgtttgtaaatctaaaccttgttgttgaattctttgtgcaaattcagacaccatacgatctaattcagtattaaccattgcttcaggaatatcgattgttgtattatcagtagcttttgtaatcgcttcttctttttcaacattttcagcatctgtagctttttgttcagctaaacgtttacgtaagttttctttgtactcgtctactgtatttgcttctgcatctaattcattagcaatttcatctgttaattctggaacttctttaaatttaatttcgttaacttttgttttgaaagttgcttctttaccagctaattcttcagcatggtattcttctgggaatgttacgacaacatctttttcttcgtcaactttcataccttctaattgctcttcgaaaccaggtatgaatgaacctgaaccgatttctaaatcgtaaccttcagcttgtccaccttcgaattcttctccgtcaactgaaccactaaagtcaatgttaactgtgtcgccattttcaacaacaccatcttctttaactaccatttcagctaaatgtcctaagctgtggtcaatcgcttcttgtaactcatcatcagataattcagtttcttgtttttcaatttcaagacctttatagtctcctaatttaacttctggctcaactgtaactgttgcttcaaaaatgaaatctttacctttttcaatttgagtaacacttacttctggttgtgcaactggtttaatatcagtttcgtcaattgcttcaccataagcatctggtaataaaatgtcgatagcatcttgatataatgcttctacaccaaagcgttgttcaaaaattggacgtggcactttacctttacggaatccaggtacgttaatttgtttaaccacttttttgaatgcttgatctaacgctttgtttactttttctgcaggaacagtaacagttaataaaccttcgttaccttcctttttttcccaagttgctgtcatgtatatatacctccatgattaactaatttattttttcaacttccctattatatcataggtctattccctatacaaacattgaaatcacaacgtttatatatttgtaaatcaacttttttcgtcaaaactatattaaaatgctgagtattattttgcaacaatttaactattattattcaaatctaattgctgaataaaattaaatgcatcgatactttgtaattcacatttaagtcctaacatatttttgaaataacattcgtatgcattaatccatttattcgtttcaaacaaagtttcaatatcaattggataaatcatgatagagtgattattcataatatggtgtgcttcttcagcgatatgtaatgcaccatcatttaatgtttccataacgttaggtataactttttctttcagtgttgtatgttctagcccatttaaattagctggtacaaaagttacatccataccatacttttcaattgtcagttcttgtgtacaatttgcaaaccttaaatactcaatcattaaactaatgaggttataactgtacgtattagattttaatatatataataccgtttcttgaaattgaaaatgaccattgtctattaacttcaaaatcaagtgcgtctgttccctcattgataacgtatcaaaatcagttaatgactgagtcaatcgtttttcatcttcaattaattttgacttagcaaattctttaagaggatgtaatgccattcttgttttgtgatctttgacttcatcaataatttgatgaattacttctaccgcttcaaaatattgtcccaaaccaatcaaacttttcacgtaataaatcatcaatgcatcatattgttgtatgccagttttcaataagacaattgtttcttctcttaattcaagaaatgaccccgtctcatataacatacggcatttcatcattgctatttcttcagtgagttcaaattgacgttcatattgcacaatatattcatacatcaggtcatagttttggtcttgttcagcacgttttatatctttatataactttttcgaagagttaggaaactgaataatatctgacatatatgtcacctcgtttgattataaatcttgaaggattaatgcgctccacgtttcgaaatcatcatatgactctatgttgcctttttcaacccattttattcgtaaagtatctgtttctttagcttctacatcattcgtacttacagtaattttaaatacaacaccaatatgtaccttgcccacttcattattatcgtcattaataaaaccgatatattccatattttgtgaatcttgctcacttaaacctacttcttcttctaattctctctgtgcattaactctcaatacttcgttaatagattctgctcctggaacatcattcatatgaccgcctacacctattgaagattgtccatgcaatcgagcttctccaccgccagataatcgttcatacactaatatctcgccatgctcattttcaagtaaacaataagaaatgagttgtttatatgatggatcctcttccatatcgccgcgtcgcttaacttcatattgacttagcgcatcaaaaatattttgaccttctggtttattcttatttaaaaacccattgaaagtattcttttcattattaaaaataatttctctaggtactacaatgatttgttcatcaaatttagacatcgtataaaactcctcactttaatgtttgttctcttaaatgcattttagcaaatatgtcatattttagcgattaaatgtggcattttgctttttaaaaaataaaaaagagatgacaatgccatctcttttttataagtgttattattttaaagcatctttagctttagttactaattgagcaaatgctttttcgtcagaaattgcgatttctgataacattttacggttaatgtcgataccagcttttttcaaaccgttcattaaacgtgagtagctcatttcatgttgacgagctgctgcgttgatacgtgtaatccataatttacggaagtcacgtttacgttgacgacggtcacggaaagcatattgacctgatttcattacttgttgcttagctactttgtataatgtatgttttgaaccgaagtaacctttagctaatttaatcgtttttttacgacgcgctcttgttactgttccacctttaactcgtggcataaaaaattcctccttaggtaattcctaccgatttctgtatttgttcttattttttgtatgctaataattgttttacacgtttcatatcgctcttagacactaatctagctttacgtaattgacgtttttgtttagtgctcttgtttgcgaataagtgagatgtgaaagctcttgaacgttttaattgacctgaagcagttcttttaacacgtttagctgctccgcggtgagttttcatttttggcataatataagtcctcctgtaatagctttaattatttttcagctgttggcgctaacatgataaacatttgacgcccgtccattttaggtttttgttcaactgttgctatatctttgcattcatctgcatatttttctagcacacgttgaccaatttccttatgcgtaatggcacgccctctgaaacgaatagatactttacatttatcgcctttagttaagaatttacgtccgtttttcaacttagtttggaaatcatgttcctcaattgttggacttaaacgaatttctttaacattgataattttttgtttctttttcatttctttttcttttttctgttgttcgaatttgaatttaccgtaatccataattcttgcaactggtggtttcgcattcggtgcaacgaccactaagtctaaatctacacgttcagccatttctaaagcttcacgctttgatttaacaccaatttgttcaccatcttgaccgattaaacgtaattcttttgcacgaattttgtcattgatttgagtttgatcttttgctatggttgacacctccaaaatttttacgaaatttgcaccaagcaaaaaggaagagcaggtataaaatacccgctcttccttatacacagttatgtgtaatgtgattaacctgccaactgctttatgcgtcgctacaggtgagaagcgggtgcttctacttggttcgtttcgtattcaacgttgttaatcatatcaacaattcacatttaagtcaacactataactgtaattatttttattttaaccttttatttcatccattgacacgtcttgacgtaaatctacttgttctaatggaatttttttcgttttatatcgaagcttatgataaataaagaatgctaaaaatactgggattcccatatacgtaattaagaagcgactaaaattaaaatctcctgttttaataaagtcaacatcttgaccaataattactacaatacataaaaagccagcaaataatggtccgaatgggaataatttagcagtatattttaatttagatttgtcataattttgtttatcaaatgctcttctaaatcgataatgacttactgctatacctacccaagcaataaaaccagttaaaccacttgctgcaacgatatattcgtatgcaccttttgtaaggctttgtaatacgaaaattatcactacaatgattgctgtaacgagtaacgacatatatggcacaccgtttttatttgttttaccaaatgcttcaaacgctaatttatctttactcattgaatatagcattcgagttgaagcatacatacctgagttacctgctgataacacagacgttaaaatgactgcattcataaatgatgctgcaaacgcaaatccagcatttttaaacactaatgtgaatggagacgttgctacattatcactaccacccattaatgcactactatcataaggaattaacataccgataacaaaaatggctaaaatgtaaaataataaaattctccagaatacttgtttaattgctttcggcacagcacgttcaggattttctgattcaccagccgtaataccaattaactcagtaccttggaatgagaaaccagcgattaagaatacacctagaattgataataaacttcctcctaagttgccaccaagaataggaccttcacctttattaaatatttcgaatcctacaacatgaccacccatgattccgacaatcgttaataaaccaattgcaatgaaaacaataactgtaaccacttttatcaatgccaaccagtattcactttcaccatagacgcgaactgataacgaattcagactaaaaattataactaagaacaacgcactccatgcccaagcgggtatgccttgcaatggtgtccaatattgaatgacttgtgctgcaatcgtaatatctgctgctacagttactacccagttaaaccaatagttccaaccaagcgcaaaccctaaagatggatcaacaaatcttgtagcatatgtactaaatgaacctgatactggcaaatacgtagccatttcgccaagtgacgtcattaagaaaaataccattattccgataattgcgtatcctattaatgcacccaaagcacctgcatcatgaattgctccaccagaagttacaaataaacctgtaccaatacaacccccaatcgcaatcatagaaatatgacgatctttaagtccccttttgacaacattgttactttcattttgaacttttgacatataagctccctttccatgttttagaggccaagaaataaataacctttattcactttcatacccttttttacagaacatagtgatattaaaagtaaaaaagtggctacatacctttaagatatgcaaccactttggcaattatctatataaggtagcacatcacattctgtgacagtacagttcctattcgaaaactgtcccaatagatataatttatggtttatatctatttcggcatctttacctttcacttgttcaacttatgtaccataaatacttctgacaagttactaattaaacatgcaacctctaactcaatttaatattttaactaacttgtaatatacaggattcatcacgcataatcaaccctgtgaaacttgatacgcaataaaaatttcaaagcattttattgcgacaactgtctatctatgtttttttaaacgaatttcatcaactagattccagataaattcatctttttcaactgtttcttggtcttgcgatccatattgacgcacattcacttgattattttcaacttccttatccccaactacgatttgataaggtattttttgcatttgagcttctctaattttataacccattttttcattacggtcatcaatacttacacgaacgccttgagatttcaattcatcttgtaattggcgcgcataatcataatgtaaatcaacgttaactggaatgatttgaacttgttttggcgctaaccaagttgggaatgcacctttagtttcttcagttaaaaatgctacaaatcgttccattgttgatacaacaccacgatgaataacaactggacgatgatgttcaccatcttgaccaatataagttaaatcaaaacgttctggtaataagaaatcaagttgtgctgttgataatgtctcttctttacccatcgctgttttaacttgaacatctagtttcggaccatagaatgccgcttcaccaatcgcttcttcgtacgataagccaagctcatccgctgcctctttaagcatattttcagctttattccacatatcatcatcatcaaagtacttttctttatcttcagggtctctataacttaatctaaagctataatcctcgaaaccaaagtctttatacacatcaataatcatgtttacaacgcgtttgaattcttctttaatttgatcaggtcgaacaaagatatgtgaatcatttaaagtcataccacgaacacgttgtaatcctgatacagcaccacttgcttcatatctatgcatcgttcctagctcagcgatacggataggtaattcacgatatgaatgtggtttattcgcataaatcatcatatgatgtggacagttcattggacgtaataccatagattcagtttcatctaactgcattggtgggaacatatcttcttgatagtgatcccagtgaccagatgttttgtataaatcaacattagcaagtactggtgtataaacgtggtcataccccatgctcacctctttatcaacaatgtaacgttcaatttcacgtctaattgttgcaccgttaggtaaccataatggcaaaccagcaccaactaattggctatttgtgaataattctaactctttaccaattttacgatgatcacgttctttacgctcttctaacatttgtaaatgtgcttttaattcttttttatcaaagaaagcagtaccgtatatacgttgtaacattttgttgttactatctccacgccagtatgcacctgctgtagataatagtttaaactctttaattttagctgttgatggaacgtgaactccacgacataaatcagtaaaatcaccttgactatataatgttacattttcatcttcaggaatcgcgtcgattaattctaatttgtattcatcattgctgaataactctttcgcttcatctcgtgaaaccacttttcgttcgattttcatattttcgttaacgatttgtttcattgtcttttcaatttgttcaaagtcatcagatgagatgttttggtcaatgtcgaagtcatagtagaatccaccttctattacaggacctacaccaaatttaacattaccatataaccttttaatcgcgtgtgccattaaatgtgcagtagaatgacgtaatacctctaacgcttcttcactacctggtgtcacaatttcaattgatccatcagtttcaagcggttttgttaaatctacaagttgcccgttaaatttgccggcaacagcttttttacgtaatccaggactaattgattgtgctatatcttcagtagtagtacctttatcaaacgcctttttattaccatctggaaattgaatattaatttgttccatgttaaaccctcctatttgctttataaatacttttatctgacctcgttaaaaaattgaacaacaatcatcgttttaacattaaacctattaacaataaacagggaatttatgacaccaacaaacatttatgtctgaaaaaacaaaaaatcccgcccctatacaagggacgagatcgtcgtggtaccaccctagttatttaatacaatttatgtattaaatatctctgcttaagataacggtcttgatccgggtattcattacaaataccataaatgaagtagtaatcatctaatttattaaccatattctcatcaaacaatggctttctgtgtaatattgattagatcatcttgtcttcaatcatttaaacgatttagatttgtattcattatacaccaatcattttaaaattcaattgtttctgaaattttctcctgataaaaaatatggtgttgacaaagatttgacacgttcaataatacgtgctgctttagtcttctcttcaccatcacgagtcatcgctaaatgatgttccaattcactatagtcaaaattagaactaaagaatgttggtaattcatgaaccattcgataatgtagcaaaggtccaattacctcatctctcacccatggagtcacttcttcagccccaatatcatcaagcattaaaatgtttgcttctcttacgcgatgtaatttcttttcaaaagaaccatctttaaagccaccttttaatgttctaataaattccggtaaataaataattgtcgaacgtaccttcttagatttgagctgattcgcaattgcacctagaataaaagatttacctgtcccaaatggaccataaaggtaaaggcctttcacttgttccccattagttattgctgtacaaatatcatctgctgccatagctacatcaagacggtctcgttgattcatataaatatctttcaatttggcatttaaagtatctcgttgcatatgatgagatgtaattagctcagcttcaaagcgttcttcgtcgtacttgattttacatgggcattgtaaatagcgtattttaattcggttattatcaacatataactcaggcacatgcccctttacgaaatttggacaatcagcaaatttatgaccgtcataatgtttttgttgatctttatactcttgtaacacatttaagtcttcatcaatcatagcattcgttaattcagctcgatgcgcttccaaaaattgcttaacatctgggtcattgattacttctttttttatcttttctattcttttttcaaagtcctgcgacgtgttaattatacttttaaattgcttcattattgactgtcctcctcccattttttagataatttatctagaaatgcttgtcgatcttgctctaattgttgatcatctacgctattatctttagccgaatcttcttcactaggtttatctctattttctaaccatttaggtgttttttcttttgaaatacgattacgctgcccaaagtatgaaccacgcttttggtaatttccgctagaaccctcatttttaggttgattaacttttttagcgtaattatatgcttctttagctgtcttaataccttttttcttccaatttgatgctatttctaaaatatacgctttaggaagtttcatatcttcttttaacatgacaaattgcaacaaaatattaatgacgccaaaagacattttttcacgttcaattaattcttcaaccattgtcttttgcgatatagttggttctgattcagaccaagaagctaacatatcaattggactcgtttgttcaagtaactcaaaccattcatcactttgtggctttggattcacttctgaagatttgcccgtcgaagatgatgtagcaggagatttcacctgtaatttaggcatttgattttcgtgttccattaagtaatacgagcgtgcttgtttacgcatttcttcaaaggataactgttgtccacttgtaattgaatttaaaataacatgcttcatgccatctgctgttaaaccatataaagtcgcgagttgtgttattaaacgctttgcatctttggtaacaatgtcttgactaataaaatgtttacctaacatttgtctcaacatttcaaagtcaaaagattcatttgataaatcgataccttggtacggttcattaatcggaatatcacttgtatcgatatctatttttgtagacggcactttaaaaacatcagtaaattgtcttgttacctgtttaaattcactcaaatcaatttgttgatactcaaagtatttcttcaactcatgaaatcgacgatgctcgacttcactatataaaaagattgacaacattggatcattaaaaaataaatgtgctgaaggcggttgaattaattggtaaacaaattgtgtttcttgttcatcatgtttgacaaacgcctttaacaatccaatcgcttcaagtaagtccatttgttgtctaaactctagtaaattaattttaagttcattcataaaaatataatgagaaagaatcaatgtttcattatgactttctttaacgaattgagtcataaaatggtataaacccactgcttgtgttccaattagcggtgtatacagccgattcaatacctctaaatgattcgtatttaaatcaaagtgttgcataactttgaattgatcctttggtcttaagccgaattcgaaggcttgtcgtcccatttaagcatcactccgtttgttttcgcttaaaatcccttgcatcgatgctaacaattgatcaacatctttaaattctttatagactgatgcaaatctaacatatgaaacttgatcaacatgcattaacaagttcataacgtgttcacctatatctcgtgaagacacttccgtatgaccttcatctcgtaattgccattcaaccttgtttgttatgtcttcaagttgttgatatctaactggtcgtttctcacaagaacgcacaagtccattaagtatcttttctcttgaaaactgctctcttgtgccatcttttttcacaactataagctgactaacttcgatatgttcaaatgtagtgaaacgtgttccacaattttcacattctcttcgtcttcgaatggcatttaattcatcggcatgccttgaatctacaactttagattgtgtagaattacatttcgggcatttcattacatcaccctctttattttgattatgcctaattatactataaatctagagatgaaaaaagaatccctcaatttaattcatttaaccaaataatgaaacaataaaaaacattatatcgttacttattaagtaatttgcatgacaatattattgtattaaaaaataaaaaacctaactccgaagtcagagttaggctataaattaattgtattaacttgcacttacagtttcttttgatgtcaaaagtgctccaatttgctcagcaacatctacaactctatttgaataaccccattcattatcataccaagcaataacttttactttattccctgacatgaccattgttgattttgcatcaataatagctgaatttggattagtattaaaatcaacagacactagtggttgatgttcgacttctatgataccttctaaacctgcattttcaaaagcttggtttacttcttctgcagttacttctttttctaaatcaacaactaaatcaacgagcgatacattctttgttggtacacgtaatgccatgccgtgtaatttaccttctaattctggtaatacttcttttaaagctttcgccgcaccagtagaagtaggaataatgctttcattacatgaacgtgcacgtcttaaatctttatgtggattatcaatatttttttggtcatttgtaatagcgtgaacagtagtcattaaaccattaactattccaaactgattatttaaaacttttgcaactggaccaatgcaattagtagtacatgaagcattactaaaaatgtcaaatgcttctatatctaattggttatcatttacgcctttaactaccatttgaacatgtccaccttttgaaggaccagttaacaaaacttttttggcacctgctttaatatgtgcgatggctttatcaccatgattaaatttaccagttgcatctatagcaatatcgatatctaattctttccatggcaagttttcaggattgcgatcagcaaccaatttaattttatgatctccaacttgcaatccattttcaatcggttcaacttttagattatattttccatgtgtcgtatcgtaattgattaaatgtgcaattgtttcgggtggataactagcatttatcgctactacatttaaatttttattttgtaatgcaatacgtaataccattcttccaattctacccataccattaattgcaatattcgttgacattaaaagcaccccttgatctttatgtgttatactttatggaattagtatagcatattatatgaaatttgaaagcgttttccgttgatttatttatcttttttataaaaaatagtcattacttacatacatcaacgcgtacgtaaagtaatgacttatttatagtgtaatattaatcttcttctccgtaattcggcttttcaatataaccttcttcttctaacaatctctcaaggttttgttttaattcaagtttatcccctaaattatcgataacatgatcggccattcggctttttttatcaatagaaatttggctatagacacgtgctttcgcatcttctaatgacaaattattacgttgcattaaacgatccatttgtatactttcagaagtgtatacaacccacacttcgtctactgtattttccaattcattttcaaataataatggaatatccatgattacattatatccttgttttaaatattcttgcttttcttcttccataatatctcgcacgataggatgtatgatagcatttaattctaagcgtttttctggatgattaaacactagatcacccatataacgacgattcatctcaccattttcatcaattgcttcatcaccaaagacttctcgtacttgagctaaacctttactcccctttttaacagcttccctggctgctttatcagcatctactactttaaaaccgaatacggataagagttctgatactgttgattttcctgaggcgattccacctgttagaccaataactttcggcataatttcactctttctttatttttgacatactggacaataatgactatttcttgtcgcgatgatttttgtttcaatttgacttccacacactttgcataccggctgcttatatacattaagatgcaattgcatctcaccagtttttccatcagcatgacgataatctgaaatacttgtaccgccatatttaataccttcttctagtacttctctaacataataaaaaaccatttcttgttgttggtgtgttaagtcttttacttttttatctggtaaaacacctgcacgaaacaacgcttcacatgcgtaaatatttccacaacctgcgattactttatgatccaaaatcacttgtttgattggtttattcttattagactgttgatgaattcgatttaaataatacgtcaatgcttcatttgaaaaaggttcaggcgctatttctaaaaatgaaggataagatgctacagacgcaacatttctaatttctccaaaacgacgtatatctgaataaattaactttttgtcatttgacaactcaaaaataacatgccaatgcttacgataattaggtatcataatatcttcaagttcatctacaatgaaaaaaccacccgccatacctaaatgactaattaatgtacgttgttctcgtttattatctagctgaaaaacgatatatttacttcttcgttctacatttgtaatggtatagccttccgataaagttttaaaagtatctaattcaattccttttataattgtttccttgccttgagctttaccttcgattactttatccgaaaatttaacgtgttcaattttttgatttataacgtagggttcaattcctctttttacatgttctacttctggtaattcgggcataccattaacctcactttattttgcatcataccaagttgcaccataacttgagtctacttttaatggaacatctaattgcaatgcattttccattatctcttctacaaattcactaaatgaatctacttctgacttaggtacttcaaaaattaattcatcgtgtacttgtaataatagtttagcttgatatgttgtctctttcattttttgagcaaatttaaccattgccagtttaatgatatctgcagcactgccctgtattggcgtattcatagcagtacgttcagcaaagccgcgtaaattaaagttacgactcgtaatatcaggaatatagcgtcgacgatgtagcaatgtttccacgtaacctaaagctttggcatcttttacaatatcagacatatattgttttacacctgggaaactagctaaataatcatcaatgaatgcttttgcttttttacgagtaatacctaaactttgacttaaaccataatcacttatcccataaacaattccaaagttaactgcttttgcttgacgacgcattaaactatcgacttgatcagcttctacaccaaatactttcatagcagttgctgtatgaatatcatcgccgttgataaatgcttctttcatactctcatcttgtgtaatgtgtgctaatacacgcaattcaatttgagaataatctgctgataatataacgctatcttttgaagttggtttaaaggcttttcttattttacgcccttcttcaagtctaaccggaatattttgtaaattaggatctacacttgataaacgtccagtttgcgctaaagtttgattaaaacgtgtatggatacgttgatcatcactaattaccttttgcaatccttcaacataagtagactgtaacttagataattgacgatattctaaaatataatcaatgataggatgttcaccttgcaattgctctaagacatctacagcagtagaatatcctgttttcgtctttttaataacaggtaattgtaatgtctcaaacaatacaacacctaattgcttaggagaatttatattaaaatcttcaccagctgcatcatggatatttcgaatcaagacgtctaatttttcttgaatttctttttccatttcttctaaatcatgaacatctgtaaatataccaatttcttccatttcacttaaaatcttagctagcggtagctctaaatcagccaagagttctacctgattgtattcttctaattgtttatccatatttggtttcgcaaagtaaattgcatcagtaatagaagcaacatatggatttaaaacatcatcttcaggtaccttaaatttcttaccttttccatatatactcacatcgtctttcacaaaactttgaccgtacaatgaaacaactgattgaacatcactaatcgtacgagatggatcaattatataactggccaacataatatcgaaagaaatattttgaatatcaatccccaatctatgtgatgctacatatgtttttttagcatcatatacgacttttttcgaattcggattttctaaccatgaaactagttcgacataattatttatgtcatccgcattaattacaatatgtttctcacctgtaaataaagagaattttaaaatattatttcgcaaatagttaccaccgtctaattcgaaatggatggccgcttctttcaatgaagtaaaatcaatattatcaaaagacgtttcaatttcaaatgtcttttctattgcatcttcaacgcttgctgattgatcaatgtcagccaacaattgtttgaattctaacttcttaaacaattcgattttttcttgttgttcatcttgatgagtcattaacgtatcttcaagttttacttcaatcggactatctacattaatcgttgctaattctttactcattagtgcatcttctttgctattttgaagtttttcttttaactttttacctgaaatttcatctaaatgttcatagacaccttctactgtgtcaaattggtttagcaattttattgctgttttctctccaacacctgcaacacctggtatattatcagaagtatctcccattaatcctttcatatcaataatttgattaggtgttaacccgttgtatttttccgcaataaagtcaggtgtataatgatcaacatcagtaacaccttttttagtgtaataaatggttacattatccgttgcaagttgtgttaaatctcggtctcccgtaataataattgtctgaaagcccgctatatctgcttctttacttaaagttccgataatatcatctgcctcatagttatctaattcataacgtttaatatgataagcatctaataattggcgaatataaggaaattgctcacttagttcaggcggcgttttctggcgtccacctttatattcactatatttttcatgtctgaaagtcgttttacctgcatcaaacgctactaaaaaatgatttggcttttcttcttttaaaatcttctctagtaacatcgcaaaaccatatactgcattggtatgaatgcctgctttgtttgataacaaaggtaatgcataaaaagctctaaaacttaagctattaccatcgattaatactaatttattcacaattttaacctccagaactaatttatatatattttagcatattcgactgtgatgtcgtaattaaagaaactatctcatagagtatttatacacgacctaatttcaaataaaacaagtgcctatatagacttagctaaaaaataaaaaagacataatcatgattgttcttgatgagcactccataaagtcaggttaaaagtccaacttttgagatgcacattaacatttcatgattatgtctactttttaatatttttatgctgctattttaaatttttataggtaagaataagttatgaatcgtctgaaccaaatggaatatatttaactttggtcattttcggtaattcttcataattattaaaccactcttggtaatttttattgattggtgacggatgatgcatataatgttcaaacggcaatgattccactgtataaacctcttgtcgtggatgatctttaatttgttgttttaataactgaactcttttttcatgttcataatgaacataaataaatgcactaagatatataacagctaaaactagtgatgcacctttaataaaattaacattgattgacttatatttccgaaattcttttaataaaataattaaaatgattacatgtatcgtataaacaatcaaaaaattacctggttcaattggagtaacaatgactagtgtcgacgccgaaacacatattgcaataagtaaggaatataaagtaatttgtgttttacgatcattaatagacaaataaatacctacaaatatcgaaaacgcaaagtaaccacatacaattacgttcacaaaaccaaccaatccaatatctgtatttttatttaataaaaactgattgtaaaatagtaaataataaagcggtaaagtgataaatcctatcataatgatacgacgctttaatattgttaaatgtacataccgatcacttctaagcagtagataaataataagcgctgcaatcatacttaaaattataatctgactgaaaatgacaccatatggaagtgacgttgatatcatttctgcaaattttgaaaagataccttgattatttgaaacttgttgatattctgatccttcaaataaaattttgcgataatttggattggaaaacataatgattgtacctatagtagcaatcataaatgaaaacaataatttataattaagtgttcgatttgcagtaaattcatacagaaaagctaaaattaaaatgatacagtggaataatgtcacattctccataaataattgaccgaagaagcataaaacatagaatagtacagtaacacttaccggctgcttttctttatatataattgcattaatacaataataaataataaagagtgaaattagtgttgatgtcgcataattataaaatcctgcaaaccagccatatgtatctgcataaatagcacttggtaaaattaacattaaagaaaatgctaacaaataatagcttgtccacgctttacaacgtgtaatgtgcataatcatccaaatgatgcccatactaatgagaccatatgaaagccaacgtaaccagcttacatgtacagctataatttcaaagatatttccgatatagcgaccattaagtgatgcaaatcctacttttaaaatatcagtattataattgctaaaccattgtaaatcatcgtgcatgagtggtagtaagatacccataaaagtataaaacaataatatcgcaattaatatcaaagttgtcttgtgtaattgaattgttttcactttgctaatcctcaaatctagttaaattttcctcaacttgtaggtcgaaaaattaattcaatatttttaatgtatttctaattttcacctatgcatgtttcctcaatcaaattagataaacaaggtatttaatattactttcaacaatttatctaaatcgcccctcgtctttttctatgacgaatgattacacttgtctattcaagtgtttaaattaagatttatttccgttcaaataaaacttattactttttaattaagcatctattttaagcgcgttactaaaatttctttattataataaatatattataaaattgcttgattcacaacaatctattacttataacttacaaatcgacatatgcaaatgacaaaattgacaaccgaatttattccacttcattaactctaatttaataccaatagagatttgaacgaaataaaaaagcagcaacaacttcgtgaaaaatacacgcgctgttaccactttaatttttattctttataatcttttagaataactttgaacgttgagcctttgccaacttgactattcacttcaatattgccttggtgggcctctactatatgctttgtaattgataatccaagacctgtcccaccagaatctctacttcgtgctttatctactctataaaatctttcaaaaatacgttgttggtcttctaatttaatacctataccaaaatcttgtacttcgaaaatgacacgaaagtcatctcgatacacacgaacgttaatatctccatcttcataagaatagttaattgcattcgttaacaaattcgtgataacttgagcaattttactttcttgtgctttaacaatgacatctttttcaatatcagtatgaatggaaatatttttttgattggcttgagtcatcatattatcaataatacgccgcgttaaatctgataaattcatatagtctgtatctaactctgtatgttgctcaatatgcgataaatctaacagatctgttactaaagattctattcgatttgattcttttaaaattatgtttaaaaacatgtctaatgattccgcatcattttttgcaccatcaataagcgtttcagcaaatcccttaattgaagtaataggtgtttttaattcatgtgaaacatttgctacaaactcacgtcttagattttcaagttgtttcagatttgttatgtcatgcatcacaactaaaatcccttgcaaacttttttgagacctagttaaaatcggaacgcatgaaatatcaaagtacttggcatggacttggtttattgcaacttccaattgttcataaataggtttttcaactttaaaactttctaaaattaattgctcaatttcagtattaacataaccgtgatagcctacttgttcaatattatgcgagatgttgaactgttcataatacgctttatttgcaacaacgatttttccatttcgatctatcattaaaatagcacttggaatattttcaatcgttgtttttaaacggttggattgaattttttgctcattattaagcttttgaaggcgtcgtgctaaatcattggtagacacaaaaagcgctttagtttctacaacattactttcaggtacacgtatgtgataataaccatttgccaacaattgtgttgcataagtaacttcttgaatgggacggattaatgtacgcttaaaactacggcttgcaaaatacagacaaatgagtacaactaaacatgtcaaaataagatatttccacaacgtccaatgcatttctgtaatatcgttattgtaacctttaatccatacatgataaccgttaaccttcttattaaaaataaaaacgtcccttttttgaatatagctatcactatttgggatagctttcagtttgccactactaaacacctttttatcatgtttagttatcaataaatctatattttgctgttttacaatttctttaactttatcaatctcattatcttggactaaataaatataagatcttgcatctgttgctagagcttgttcgtgtttttctgataaaacatatgtgatggaagcgtgaataataatgcctaatgtaacaaaactgataattaatatactgcttatcaataacattaagcggtggtgaaacttcatcattgttctttaggtctttccaatttatagcctaagccacgcacagttttaataagttgtggcttcttaggattatcttctaatttatctcttaaatgactgatatgtacatcaacaattcttgagtctcctgcaaattcataattccataccgtatttaacatatgctctctcgtaatgactctgccttgtctttctatcaaataaagcaagagttcaaattctttcggtgttagctccaataactcattatgcttatatacttcaaaataatcgggtctaatacgtatcgatccgatggtaatatcatcgtcaatctcttctacttcttttacaaattgagaacgtcttaaaatggctttcacacgggcaacaacttctctaggtgaaaaaggcttagtcatatagtcatcggcacctaattctaaacctaatacccgatcaaattcatcatttttcgccgttaacattaatatagggactaaatttttatttgttcttacagtcttacatacgtcaatgccatcttttttaggtagcataacatctaaaataattaaatctggctgttcactttctaccttttctaaagcctcatcaccatcaaatgcgacaacaacttcataaccagctgtttctaagttatatttaagtaatgttacgattgaatgttcgtcatctactaccaacactttttgcgacatggtatgcctccctaacttataattatatttacattataaccgaactatttataaaaataacatcctacacattatctttacacattttttacattactttacatataaataaaatacttcttatatttccttctatcatttgcatgacttactctaggacaacgaaataaattttgtaaaaatagcatttctatcccactacctatgcatgagttttactcatttattcctaagcttatgtacatattcgctttgtctaatgtgtaagaaacactacataatcaatcattggtaactctttattatttctatcctgttgccaacttcaattcatttaaaaaggcgaacctagcaatttaagttgctagactcacctaattttattttgcttattttaaatttttaatcaattcatctgcaaatgctgatgtagaaacttcttcagcaccatccattaaacgggcaaagtcataagtaacaacttttgaagcaattgtatcttcaattgaatctgtaatcttatctgccgcttcttgccatcctaaatgttctaacattaatacagaacttaaaattactgaagatggattcactttatttaaacctgcatattttggagctgtaccatgtgttgcttcaaaaatagcatgacctgtttcataattaatgtttgcacctggcgcaataccaataccaccaacttgtgcagctaaagcatctgaaatatagtcaccattcaagttcatagttgctacaacatcatgctcagctggacgagttaaaatttgttgtaagaaaatgtcagcaatagaatctttaatgataatcttgccttctttttcagctttttcttgagcagcattagcagcatctctgccttcattttcaacaatttcgtcatattgttgccaagtgaatacttgatcaccaaattcagataatgctaaatcgtaaccccactgcttaaatgagccttctgtaaatttcataatattacctttatgaactaaagtaactgatttacggttattatcgatagcatattgtatagctgctctaactaatcgctcagttccttctttagaaactggtttaataccaatacctgaagtttctgggaatcgaatgtttgtcgcacccatttcgttttgtaagaagtcaattacctttttaacttctgttgtaccttctttaaattcaataccagcataaatgtcttcagtattttcacggaaaataaccatatcaacatcttgtggacgtttaacaggtgatggtactcctttaaaccaacgtaccggtcttaagcaagtaaataaatctaattcttggcgtaaagccacatttaatgatctaataccaccaccaattggtgttgttaaaggtcctttaacagcaattaaatattctttaattgtatcaagtgtttcttgaggtaaccattcaccagttgtatcaaatgctttttggccagctagcacttctttccattcaatgcgtttttcgccattataggctttctcaacagcagcatctataactcggcttgctgccttccaaatatccggtccaattccatcaccgataataaatgggataattggttcattaggtacgtttaatccttcagttccttgagtaattttttctgcagtcatagttattttacctccaaattttacatcttcatttttaatttgtattgattattttctttcttcaagcgggatatacttacgattcgtttcgccaatatatttcgctctaggacgcataattctattatctttatattgttctaaaatatgagcaatccatcctgcagaacgacttacagcaaagattggcgtgaataagtcatgaggtatttccatacagtgataaacactcgcactataaaaatcaacattaggaattaatcctttttcttctgccatacgtttttccattttcactgacatttcaaataattcttcacgaccagcgtctttcgtaatttgacggctcatttctcttaaatatttcgctctaggatcaccatctttatatacacgatgaccgaagcccattactttatctttattagcaaatttttcatctaagtaagcatcaacattttcaattgacccaatctcagataacatcgtcataacttgttcgtttgcaccaccatgtaatggccctttcagagaacctacagctgctacaatacctgagtacatatctgataatgatgataccgcacaacgtgctgtaaatgcagatgcgttcaactcatgatcagcgtgtaaaataagtgctttattgaaggcttctacttctatatctgttggtaattccccacgtaacatatataggaagtttgccgcataacttaagtcaggattaggcttaagtggttctttatcttgtcttactcgagcaaacgctgtaactaatgatgctactttagcctgtatacgcattgctctttcataacgattttcatctgattcattttcagcatcaggatcgaaatgtgcaatatatgataacgacgtacgtaatgctgtcattggatgcacgtgatctgtaacatactcctcaaaatgtgtatacacacgaggatttaatgtcatgtattgatttaatttcccttttagatgagcaagctcttcttcgtttggcaatctatagttccataataggaaaataacttcttcaaattgcgcattttcagctagatcatcaatatcatagccggcataagtcaattgactttcaataattgaacttattttagtctccgctgcgataaccccttctaaacctctttgtaattctgccatgataaatttcccctttactgtttctttatgaaatggctttcaactaatattatagctaaacgcatttcgtttgtgaaatataaaaactggcattatatgtgcaacaatttttttgtaaatctatgtaaatgtcacagaatagccacaaatagcaccattaaagctttttcaagatgtgaataatccatgaattttacaatagaattaaattttcaattggttattatatatgattataaaaaccaaagtatattaacatggaattttacacatttttaccgaaaataattgtatatatctcaatataagtgcataataaacatatctatatttaagggagatgtattatggctgaaaaattacaaagggaactgagcaatcgccacatacaattaattgcaattggcggtgcaattggtacaggcttattcttaggtgctggtcaaacgattgcattaaccggcccttcaattctattaacatacatcattataggatttatgttatttatgtttatgcgaggtttaggagaaatcattatacagaatactgaatttaaatctttcgcagatgtaaccaatacatatattgggccttttgcaggatttgttaccggatggacatactggttctgttggattattacaggtatggctgaagtaacggctgtggcaaaatatgttagcttttggttcccagaaattccaaactggataagtgcactattttgtgtactgttattaatgtcattcaacctacttagcgcaagacttttcggagaattagaattttggttctctatcattaaaatagcgacaattattggtttaatagtagttggtttcgtcatgattctatttgcatttaaaactcaattcgggcatgccagtttcacaaatttatatgaacacggcatattcgctaaaggtgcttctggattctttatgtctttccaaatggcactattctcatttgtaggaattgaaatgattggtgttacagctggggaaacaaaagatccagttaaaacaattccaaaagcaattaacagtgtacccattagaattttaatattttacgttggggcgttagcggttatcatgtctattatcccttggcagcaagttgatcctgataacagtccattcgtaaaattattcgcattgatcggtattccgtttgctgcgggcttgattaattttgtagtattaaccgctgctgcttcatcatgtaatagtggtatattctcaaatagccgtatgcttttcggtttatcaagtcaacaacaagcacctccgaacttttctaagacgaataaatatggcgttccacatgttgcaatctttgcttcatcagcattattacttgtggcagcattactaaactatattttcccagatgcgacaaaagtatttacgtatgtgactaccatctctacagtgttatttttagttgtatggggtctgattatcattgcatatatcaattatagtcgtaaaaacccagatctacataaaaatgctacgtacaaactattaggtggtaaatatatgggctacttaatatttgtattcttcatttttgtgttcgggttattatttattaatgttgatacaagacgtgcaatttattttattccgatttggtttatacttttagcatttatgtacttaagatataaacgtatcgctgctaaatcaaataaataacaacaagttttacccctgttgaatatactaaagttcaacaggggtttttatatgcaacttataatattaaattgcgtacttggctcaaaacttttactttctcatctatttaataatgtatcatttcagaaatacatccatacttctattttataataaatttccaaagtaatatgagtgaaagtttgaaggtgataatgtacatgtataaaagatataaacatttatatagattgccattcatacactatcattatcaaataacctattaattacgtcataaaataccagatgaaccaaaaaacgcctttccattgttgataaatggaaagacgtttttttataaattatagtacgtttgcatatccttcaaagattttaccttgagcagcatcaatcgtaactaacatgttattgcttatgtttttaacagctttttctacacctacaactgttggaatacctttttctaaaccaacaattgcacttggtgatgtaataccattttcttctgtaattaagcctaaagctttttctacataaggtacaaacgtttcatcgattgagttagtaacgataactttgtcagataaatctttaccttctaaatctttaacagtttcagcaactaacgtagtaccaacaactgatccacgtccaataccttgaccattagcaatttcgtcaccaactaggtggattttcatcatattagtagttccagtttcaccagttggtacaccagcagtaataatgattaaatcaccattagatactctaccagtttcaacagctgttgcaactgcattgtttaacaatgcatctgtactcttacgtccttttttaactacaggttgaactccccaaacaattgaacattgacgtgcagtttcttcacttggagtcaccgcaataatgtctgaatgtggacgatatttagagatagtacgtgccgttgaaccactttcagtagcagctacaattgctttaacatttaagtttaaagctgtatgtgcaaccgaaataccgatagcattcactaatgaagtttcaactaatttagtacgatctgacaataactttttgtaatcttgggctgcttcagctgatacagcaatatttctcattgttttaacagcttcttcaggatataaaccagcagcagtttcaccagataacattactgcatctgtaccatcatagattgcgttggcaacgtcactagcttctgcacgtgtagcacgtgggttacgttgcatagaatctaacatttgtgtagctgtaataactggtttacctaatttgttacattgtctgattaaatctttttgaaccattggtactttttcaggtggaatttcaacacccatgtcaccacgtgcaaccattaaaccatcagacacttcaagaatttccgcaatattatcaataccttcttggttttcaattttagggaatactgaaatgttagctttttgttcttctaaaatttcacgaatttctaaaacatcactaggacgacgtacgaaacttgctgcaatgaagtcaacattttctttaataccgaaacggatatcttcagcatctttttctgtaataccaggtaaacttactcttacgccaggtaagttaacaccttttttgtttttaagctcaccagagtttaaaatatcacatttaacttcttttttagcatggtcaatatctttaacttgtaattcaattaagccatcatcaagtaaaatgtatgaacctacttgaacatcgttaattaagttttcatatgttactgagaacttttcaggtgttccttcaacttcattcatgctaacaataacttcgttaccacgttcaagttcaatgataccgtctttcatattatgcgtacgaatttctggaccttttgtatctaataaaattgctacaattttgtctaatcttttagctactttacgaattgtatcaattctacctttatgctcttcatgactaccatgtgaaaagtttaatcgtgcaacgttcataccagcattgattaatttctcaatcatttcttctgattctgaagctggtccaattgtacatacaattttagtttttctcattttataattcctcctgaaatcttatatagataacttgttagcaagttcatatagactataatcaaatttatgatctttaccatcaaaaatttcatcaaaagatgttgctacaattttattgttcttaattccaacacccttagctgtttcaccttgcattaataagtctaccgcatatccacctaaacgtgatgctaaaactctatccgcacctgttgggctaccaccacgttgaacgtgacctaacacagacactctattatcaacattgatgtattgtgataattctttttgacaatcttgcgcagtcatacaaccttctgctacaagaacgattgagtgtttcttaccacgtttaataccttgttcaattttatcagctatttctttaatatctgttttcacttctggaactacaattgtctcagcaccaactgataatccagcccataatgctagatctccacaatcacggcccattgcttcaatgataaatgttcgtgcgtgacttgacgcagtgtctctaattttgtcgactaagccaataatcgtatttaatgctgtgtcaaatccaattgtaaaatcagtaccattgatatcattgtcaatcgtaccaggaataccgatagtttgaatttctttgcattcctcactgatgcgttgtgcaccgcgataactaccgtcaccaccaataactacaaggccctcaatccctcttttacgtaagttttcgattgcaactttacgtacttcttgctccttaaactctggacatcttgctgaatacaagaatgtacctccacgctgaatcgtatccccaactgatcctaattcaagtttatgaatatcatcatttaacaatccttggtaaccatgatacacaccataaacttcaatttcattgtaaattgctgtacgaacaactgctcttacggcagcattcattccaggtgaatctccaccactagttaaaactgcaattttcttcatgacgacatacctttctataactgatttatctttaactctaaattaccacaaattgatatgtcattccatcaaaactaatgtattgaattgatgtaaacgttttaaatattgaattttattttaacttaattaaaaaaagattagtagccacaattttgactactaatcttagttaaaattcagtatctaaatattaaattattgttttaatgtacttcaatttatggtaaaacccagtatcgatttaacataaaaatgctcaagttgattattctatataagaaccgatatttctgaatttttcaaagcgatcattagcaatttcatcacgtgataatgactcaagtgaatctaactgtgcaacaaacgctgatttaatagctaaagcttgctgttcaacatctttatgtgcaccgccaagtggttcagaaatgacatcatctataatacctaattgcttaatatcatgggcagtaattttcattgtttcagctgcaattttagccaaattactgtctttccataataatgccgctgcaccttcaggagatataacagagtaagtactattctctaacatcaatactttattggcaataccaatacctagagcacctccactgccaccttcaccaatgacaatcgcaataactggtacttttaatgaagccatctcaatcaaatttgttgcgatagattcactttgtccacgttcttcagcagctttaccaggatatgcaccttttgtatctataaatgtaaagataggacgattgaatttttcagcttgtttcattaaacgtaatgcttttcgataaccttctggatgcgccataccaaaatttcgataaatattatcttttgtatcttttccacgttgttgtccaataactgtaacagcacgaccatttaaaaagccaataccaccaatcattgctggatcatctctaaaattacgatcaccatgtagttccataaacgaatcaaagatatatggaatataatctagggtcgtaggtctttcttgtaaacgcgcaatttgcacacgatcccatggttttagatttgtatatatttttttagtttctcgttccaatgacgcttcaagcatgtcaatttcttcttgtaaatccacatcatttttatcttgagattcttttaaagattcaattttatttcgaatttcaaaaagtggtttttcaaaatctaacattatttagtcacctcttgatggatttttagaatttcagacaatgtttgacgcatatcattacgatgtacaactttatccaattgtccatgctctaataaaaattctgcagtttggaaatcatctggcaatttttcgtttattgtctgttcaataactcgacgacctgcaaaacctatcaacgcttttggctcacttaaatttatatcaccaactgatgcaaaacttgcagatacaccaccagtagttggatgtgttaaatatgatatatataatagtccagcgtcagaatgacgttttaaagatacactggttttacccatttgcatcaaggaaataataccttcttgcatacgtgcaccaccacttgcagagaaaagaataaatggtaaacggttctcagtgcagtaatcaatgatgcgacatatcttttcaccgataaccgatcccatacttcccattctaaaacgtgaatccatgacagcaacgccaaatttcataccatctagttgcgctgtaccagtcacaactgcttctttaagacctgtcttttgttggtccttttcaattttttctaaataacttggaaaatctaatggattcgcagaggtcattcccttatcgaattctgtaaatgatccttcatcagaaattgcttctatacgtttatacgcagttaaagcaatatgatgatcacaattaaagcacacatttaaattttcagctaattcttttgtgtacataattttcttacactttggacacttagtcataatacctgcaggcacatcattatttttagagtcttgtactgtaagatatttctttttctttgttcgattaaaaaaatctttaaacataggaaaacctccaaataacctctgttctaaccatttagagccttaaactgaacttgaccagttaaaaacgggtttaaatttatttgatttatattcgtttgactgttgaatgtttatcataaactttcattttcatcattttaatgactctttattgctaacttttaagcaatttaattaaacgttaattatttttattgtaaatctgtaagtttcattgttttatcatacacatcttgcggatcaacttcaatcctagctactccagattccattgccgctttagcaacattacgagcaactgatggcgctacacgtttatcaaacggtcctgggatacagtagtcttcatttaattcagaactatcgattaaatcagcaatcgcttctacagctgcctttttcatttcttcatttatatgtgtagcttcaacctctaatgcacctctaaaaataccagggaaagctaatacattatttatttggttaggatagtctgaacgtcctgtaccaacaactcgtgcacctgccgctttggcatcatcaggtattatttcaggatttggattagccattgcaaatataattggattatctgccatactcttaaccatatcttgtgacagcgcattagctacagaaactccgataaatacatctgcgtcttttacgacttcttctaaagacccttcaatcttatctttatttgtccatttagctacaacatctttcgtaggattcataccatatgaacgtccttcaaaaattgcgcctcttgagtcacacataaccatatttcttacaccatacgcgtatagtaatttaacaatggctattcctgctgcaccagcaccatttagtacaacttttattttagcaatatctttgttaacaactctcaatgcatttaccaaacctgccattgttacaattgctgtaccatgttgatcgtcatggaataccggaatattagtttcttttttcaatcgttcttcaatttcaaaacaacgtggtgccgaaatatcctctaaattaataccaccataattaggttctaacaacttaactgttttaatgatttcttcggtatcagttgtatttaacgcaataggcaccccattgataccagcgaagcttttgaataatactgctttaccttccattacaggaatacttgcttcaggtccaatgttacctaaacctaataccgctgttccatcagtaataactgcaactgtatttcctttaattgtgtaatcatatacttttcttttatcttcataaatatctttacacggttcagcaacgccaggtgagtatgctaaacttaattcctctttattagtaacttttacatttggtttaacttctaatttaccttgattacgtttgtgcatttccaatgcttcatctcttaatgacatgaaatcagcccctaattcaatatttatttttaaaaaataacttggataaaacgcattacattataaaagtaaaaatattgggtaaatctgaatgagtaagaatttatggttttgattatgtaacacaaatagcgataaacgataataaaataatatttataaagatacattaaaccatactatctaaagatatacctttaattattataatggatagcaaaaaccaatatatcaaaaagttattatttttccgcacgatatatcgacaaaattctttactcaatttatgtatactgctttttgtgctaattattcttatggattaatcaataatgtaaagtgaaactcataaaaataataagcataaaaaactaatataaacgcaaactgatggttaaaaaatatctaaccatcagtttactatatcataatttattagttgataaaagttatataagcctaatatcactagggttaaaggattgtataaaattattaaacatactatctttttgattaatatagcctatagtagtcatttgtttaatcgtttcatcataaaaggataacataacatcattagcattctctttcgtagctttaatcatctcttcaaacatatctatttgtgatttatttctaattataatttgtttggcaaatgctaatttttgttcttcaaaagtggctaatgcttgaatctcatttataattagttgccgttgttgctttctatggtcaaatttcccgctaactataaacaagtcattatgtgataacaactcttcgtactttttaaactgattagggaaaatcacaccatctaaagtttcaatgccatcatttaatatgacgaatgccatattttgaccatttttagttcgaatttgtttaactttatcaaactgtactaatataggtttattattctgcgcgttactcaatttaaatatcgttaaatattgtttggcaacaaactttttatctactgggtgttgcgaaacataaaatcctaaatattctttttcgtactgactaataagtgcatcaggcaattcttctttatcttcatacatctgttttggcgttaaaatatcaaataaaaaaccatcttgttcaatgtttaaatcgccatccaacacttgatcaatagcttgcaacaacgttgaacgtgttttaccaaaagcatcaaacgctcccactaaaatcagtgcttcaagtaactttctcgttttgactctcttcggtatacgtctagcaaaatcaaagaaatctttatatttgccgttctgataacgttcatcaacaatcactttcacactttgataaccaacacctttaattgtaccaattgataaataaatgccttcttgggaaggtttataaaaccaatgactttcgttaatgttcggtggcaatatagtgataccttgtttttttgcttcttctatcatttgagcagttttcttctcacttccaataacattacttaaaatatttgcgtaaaaataatttggataatggacttttaaaaagctcataatgtatgcaattttagaatagctgacagcatgtgctctaggaaaaccataatcagcaaatttcagaatcaaatcaaatatttgcttactaatgtcttcgtgataaccattttgctttgcaccttctataaaatgttgacgctcactttcaagaacagctctattttttttactcattgctcttcttaaaatatccgcttcaccataactgaagtttgcaaatgtgctcgctatttgcataatttgctcttgataaataataacaccgtaagtattttttaatatcggttctaaatgcggatgtaaatattgaactttgcttggatcatgtcttcttgtaatgtaagttggaatttcttccattggacctggtctatacaaagaagttacagccacaatatcttcaaagtgttccggctttaatttttttaatacacttcttacaccgtcagactctaattggaatatgccagtcgtatctccttgcgacaacaattcaaacactttttgatcatcgaacggaatcttttcgatatcaatattaatacctaaatcttttttgacttgtgttaagatttgatgaataatcgataagtttctcaaacctagaaaatctatttttaataacccaatacgttcggcttcagtcattgtccattgcgttaataatcctgtatcccctttcgttaaaggggcatattcatataatggatggtcattaataataattcctgccgcatgtgtagatgtatgtcttggtaaaccttctaactttttacaaatactgaaccagcgttcatgtcgatggtttcgatgtacaaactttttaaaatcgtcaatttgatatgcttcatcaagtgtaattcctaatttatgtgggattaaacttgaaatttcatttaatgtaacttcatcaaaccccataattcttccaacatctctagcaactgctcttgcaagcagatgaccgaaagtcacaattccagatacatgtagctcgccatatttttcttggacgtactgaatgaccctttctcggcgtgtatcttcaaagtcaatatcaatatcaggcattgttacacgttctgggtttaaaaaacgttcaaataatagattgaatttaataggatcaatcgttgtaattcccaataaataactgaccagtgagccagctgaagaaccacgaccaggacctaccatcacatcattcgttttcgcataatggattaaatcacttactattaagaaataatcttcaaaacccatattagtaataactttatactcatatttcaatcgctctaaatagacgtcataattaagttctaattttttcaattgtgtaactaagacacgccacaaatattttttagctgattcatcattaggtgtctcatattgaggaagtagagattgatgatattttaattctgcatcacacttttgagctataacatcaacctgcgttaaatattcttggttaatatctaattgattaatttccttttcagttaaaaaatgtgcaccaaaatcttcttgatcatgaattaagtctaattttgtattgtctctaatagctgctaatgcagaaatcgtatcggcatcttgacgtgtttggtaacaaacattttgaatccaaacatgttttctaccttgaatcgaaatactaaggtggtccatatatgtgtcattatgggtttcaaacacttgtacaatatcacgatgttgatcaccgacttttttaaaaatgataatcatattgttagaaaatcgttttaataattcaaacgacacatgttctaatgcattcatttttatttccgatgatagttgatacaaatcttttaatccatcattatttttagctagaacaactgtttcgactgtatttaatccatttgtcacatatattgtcataccaaaaatcggtttaatgttatttgctatacatgcatcataaaatttaggaaaaccatacaatacattggtgtcagttatggcaagtgcatcaacattttcagacacagcaagtcttacggcatcttctatttttaagcttgaatttaacaaatcataagccgtatgaatatttaaatatgccaccatgattgaatggcccctttctattagttaagttttgtgcgtaaagctgtagcaagttgctcaaattcatcccagctgtccactgaaactcctgacgcattcggatgaccaccgccaccaaaatcttgcgcaatatcattaataatcaattgccctttagaacgtaatcgacatctgatttcattaccttcatcgactgcaaatacccatattttcaagcctttgatgtcagcaattgtattaacaaactgagatgcttcatttggctgaataccgaattgctccaatacatcttcagttattttaacttggcagaatccatcatccataagttcgaaatgttgtaaaacataaccttgaaacggcaacatttttgggtccttctccatcattttatttaaaagcgcattatgatcaatatcatgcccaattaactttccagcaatttccatagtatgttctgaggtattgttaaaaaggaatcgcccagtatcaccgacgataccaagatataaaacgctcgcgatatctttattaacaattgcttcatcattaaaatgtgagattaaatcgtaaatgatttcacttgtagatgacgcgttcgtattaactaaattaatatcaccatactgatcaactgcaggatgatgatctattttaataagtttacgacctgtactataacgttcatcgtcaattcgtggagcattggcagtatcacatacaattacaagcgcatcttgatatgttttatcatcaatgttatctaactctccaataaaacttaatgatgattccgcttcacccactgcaaatacttgcttttgcggaaatttctgctgaatatagtattttaaaccaagttgtgaaccatatgcatcaggatctggtctaacatgtctgtgtataataattgtatcgttgtcttcgatacatttcataatttcattcaaagtactaatcattttcatactcccttttttagaaaagttgcttaatttaagcattagtctatatcaaaatatctaaattataaaaattgttactaccatattaaactatttgcccgttttaattatttagatatatatatattttcatactatttagttcaggggccccaacacagagaaattggacccccaatttctacaaacaatgcaagttggggtggggccccaacgtttgtgcgaaatctatcttatgcctattttctctgctaagttcctatacttcgtcaaacatttggcatatcacgagagcgctcgctactttgtcgttttgactatgcatgttcacttctattttggcgaagtttcttccgacgtctagtatgccaaagcgcactgttatatgtgattcaataggtactgttttaatatacacgatatttaagttctctatcatgacattaccttttttaaatttacgcatttcatattgtattgtttcttctataatacttacaaatgccgctttacttactgttccgtaatgattgattaaaagtggtgaaacttctactgtaattccatcttgattcattgttatatatttggcgatttgatcgttaattgtttcacccatctgaggctgtcttcctaaaagttgcatagactttaaaacatcttgtctattaatcacacccactgtctttttattactcgaaacgacaggaatcaattcaataccttcccaaatcatcatatgcgcacaacttgctactgtactcatagcatttacataaataggatttcgcgtcatcactttatctatttcgtcgtcgtcctttgtattaatcatctctcgacttgttacaatacctactaatttatacgactcattgactaccggaaatcttgtatggccagttcgattcgccatacgcttataatctgctattttcatcgtatcaaacagcacagacaaatcatctaatggcgtcattatatcttgaactattaagatatcttttcgtattttctgattaaaaagtgctttgttgataatatttgcaactaggaatgtatcataacttgatgatagaacaggtaaatcatgttcattcgcaaaattaataactttattagatggcttaaatccaccagtaattaatatagccgtacctctttttaaagcttcaatctgcacatcttcgcgatttccgacaatcaataatgtctttggaccaatatactttaaaatatctttgagttccattgctccaattgcaaatttagataccatcttagtgatacctttgttgccacctaacacttggccatcaataatattgacaatttcattaaaagttaaatgttcaatttcattacgattacgtttttcgattcgaaccgtaccaacacgatctatcgttgcgaccatgcccattttatcagcatctttaattgcacgatatgctgtcccttcagatacgtttaaaaatttagcgattttacgcaccgaaattttagagcctatagataacgattcaatataatctaaaatttgttcatgttttgtcattctttacctcttcttttcgaacagtattaactacattataactttattttggataaaaagcattgaagtgaaatgaaataatgatcgtttcacctattttattttttgaaaatatacaacaaacacaaagatcacaaaatctttaattttaaatggaaaaatccattattatttattagaatgtaagtgaggagggatgtactaatgtataaaaatatattacttggtgtagacactcagttaaaaaatgaaaaagcactaaaagaagtgtctaaattagctggcgaaggtacagtcgtaacagttttaaacgcaatcagcgaacaagatgctcaagcatcaattaaagcaggtgttcatttaaacaaacttactgaagaacgaagcaagcgattggaaaaaacacgcaaagctttagaagattatggtattgattatgaccaaataattgttcgtggtaatgcaaaagaagaactattaaaacatgctaatagcggtaaatacgaaattgttgttttaagtaaccgtaaagcagaagacaaaaagaaatttgtacttggaagtgtcagccacaaagtagcaaaacgtgcgactatccctgtattaatcgttaaataaaatttttatccagaatcacaaataatctttcaatcatgatgcagtctcaaacgactgagtaaatacaagaaacgattatgactgtggttctggattttttatatcgtagtaaatttataatcaatgtctaattgtataaaactaaaattacgagagtaggtcagaaatgataaagaaccactgatgtcccccgtccacgtcgtaactgaatcagtagaatataaaaacacccactaaaaatatgcagacgataacttccacatagattagcgaggtgttttttagtgtaaaatctatattctatttaaaactgaacagattcacctggttttaaaatttgcacgtcccctacattaacagcatctttaaattgttgtggatcttgttcgattaatgggaatgtatcataatgaatcggtacagaaatttttggtttaataaattcattaatagcataacttgcatcatcaatacccatcgtaaaattatctccaattggtacaaaacatacatcaactggatgacgtttcgcaataagtgacatatcactaaacagacctgtatcaccagtatgataaattgtttttccttcaacttcaaacacgatacccattggcatacctaaataaactggaataccattttcatgtgtaaaacttgaactatgaaatgcttgaacaaatttaacgcttccgaaatcaaagtttgctttaccaccaatattcataccatgaacattttcaacaccgtgatatgaagaaagatagtcagccatttctgcacttccaattactgttgctcctgttttctttgctagttccacaacatcaccaaaatgatcaaaatgaccgtgcgttaaaacgatatagtctacctgcactgtttcaatattcaaatcacacttagggttatttgaaataaacggatctacgataacctttttgttgttcccttctaaataaatcgttgattgaccatgaaatgataacttcatttgagcatcctcctatcaattgctatataaatttagtacccttttgccacttaattataacaaattctcaaattttaaaaattgaaaatctagttaatgtattagctcgattttgaaatctaataataattggcataaaatggaagtaatattatgttgaggagtgtttataaaatgacaaaaacatcaaaaataatagacgaactgaacaatcaacaagctgatgcagcatggattacaacaccgttgaatgtatattattttactggataccgtagcgaaccccatgaaagattatttgcattattgattaagaaagatggtaaacaagtactattttgtccaaaaatggaagtcgaagaagtcaaagcatcacctttcacaggtgaaatcgttggatatttagacactgaaaaccctttttcactttatcctcaaacaatcaataaattactaattgaaagcgagcacttaacagtagcacgccaaaaacaattaatctctggtttcaatgtcaattcattcggagatgttgatttaacaatcaaacaattgagaaatattaaatccgaagatgaaattagcaaaatacgtaaagctgctgagttagcagataagtgtatcgaaataggtgtttcttatttaaaagaaggtgtgactgaacgtgaagtagtcaaccatattgagcaaactatcaaacaatatggcgtcaatgaaatgagttttgatacgatggttttatttggagatcatgccgcatcacctcatggcacaccaggagatcgcagattaaaaagcaatgaatatgtactatttgatttaggtgtaatttatgagcattattgtagcgatatgacacgtaccattaaatttggtgaacctagcaaagaagcacaagaaatttataatattgtattagaagcagaaacatctgcaatccaagcaattaaacctggaatacctttaaaagatatcgatcatatcgctagaaatattatttcagaaaaaggctatggtgaatatttccctcatcgcttaggtcatggcctaggattacaagaacatgaatatcaagatgtttcaagtactaattctaatttgttagaagctggcatggttattacaatcgaaccaggtatttatgtacctggtgttgcaggtgtaagaattgaagatgacatacttgtcactaatgaaggatatgaagtattaacacattacgaaaaataaggagtgggacaaaaatgaaaagcttgttacaagcgtattctcattcagtcaaacactgccaatataacattgtagcgcctaagacataaatttttatccaagtctaaatgcaatatgtaacaaacaagctagaaacacatatgcaggtatgttcatcagtaacatgtaatgaatcaaatcaatatcattcatgttcgatgatttcttcgcattgtttctagctttaatttatcattatttaattttaataaccaaggagatgataacgtcattctttagtacgctgtaatccattcccttttcattaaattcaaattataattgtaatgcttcttctacagatttatattccatttcaaatgcctctgcaacgcctttattggttacatgacctttgtaagtatttaaacctaatgataatggttgatttgatttaaatgcttctctataccctttattagctagcatgagcgcataaggtagcgtagcattatttaaagctaacgtcgaagtacgcggtactgcacctggcatatttgcaactgcataatgaaccacaccatgcttaatatatgtaggatcatcatgtgtcgtaattttatcagttgtttcaaaaataccgccttgatcaatagcaatgtcaataataactgacccatttttcatttgtttaatcatgtcttctgttacaagtcttggcgctttagcacctggaattaaaactgcacctattactaaatcactttgtttaacatacaactcaatattcaacggatttgacataattgtatgtacacgtccaccgaataaatcatctaattgttgtaaacgctttggattaacatctaaaatcgtaacatctgcacctagtcctagtgcaattttagctgcatttgttcctgcttgaccaccaccgataatagttactttacctttaggtactcctggaacaccacctagtagaattcccataccaccattgagtttttgtaggaactctgcaccaacttgagctgacattcttcctgctacctcactcattggtgataacaatggtaaagatcggtctggtaactgcacagtctcatatgcaatactaattacttttctatctatcaaagcttgtgttaatttttcttcatttgctaaatgaagataagtgaataatacaagcccttctttaaaatatggatattcagattcaagtggttctttaactttaataaccatatccacatcccaaacttttgcttgttcagcaacaatctcagcacctgcttctttgtaatctacatcttcaaagaacgatcctgaacccgcatttgtttccactaaaacagtatgcccactttctactaaagcgtgcacaccacttggtgataaaccaacacgattttcattatttttaatctcccttggtataccaattttcataccatccacctccataatcatcttaacgcgaacattttgaaagcgcaatcaaaaatccacaaaattgtaaaggttattacactgacttttccgaaaattgtggtaaaatataattaagaaagaacaaggaggcacttactatgattacttacaaaaatattttaatcgcagttgacggttcacatgaagcggaatgggcatttaacagagcagttggtgttgctaaacgtaacgatgcgaagttaacaattgtgaatgtaattgattcaagaacgtattcttcttatgaagtttatgatgctcaatttactgaaaaatctaagcattttgcagaagaattattaaatggttataaagaagtagctactaacgctggtgttaaagatgtagaaacgcgtctagagtttggctctcctaaatctatcattcctaaaaagcttgcacatgaaattaatgcagacttgattatgagtggtacatcaggcttaaatgccgtggaaagatttattgttggttctgtatcagaatctatcgttcgtcatgcgccatgtgacgtgttagttgttcgtactgaagagttaccagcagacttccaaccacaagttgcaacaactcaattacgtgaaaaatatcaaaattaaatatagatgatcattagataactacttgatcattatgaaccaagtgcaactttctgcacttggttttttattgtttataaataaaactcacttaataatgttttcataatcttcttcgactacttaattctttaagatattcgtgaaaagagacattacactagttaattttcaaacaatacaaaaagcgtctacctcctacatataattgtagcggagatagacgcttaatatttatttaaaaattattttaaaccaccgaatgtcataacatcacgggcaatcatactttcttcatctgttggaataacgacaactttaactggtgaatgaggatagttaataaatccttctttaccacgtagtaagttttcatttttcttaggatcccagtaaacacccataaattctaagccttcaagaactttcgcacgaatttctactgagttttcaccgatacctgctgtaaatacgataacatcaacaccatgcattctcgcagcatatgatccaatatatttgtgaattttagaagcaaatacatctaaagccatttgtgaacgtgctttacctgattcagcttcttctgataagtcacgtaaatcactagatgtacctgataatcctaataaacctgattctttgtttaagatttccaatacttgttcagcagttttacctgttttttccataataaatggaattaaagcagggtcaatattaccagaacgagtacccattgttacaccagcaagtggtgtgaagcccattgatgtatcaatagatttaccgccatcgatagctgcaattgatgctccattaccaatgtgacatgaaataatacgtaaatcttcaattggcttatctaacatttctgccgctctttgtgatacaaatttatggcttgtaccatggaaaccatacttacgaatgccataatctttataataatgatatggcaagctatatagatatgctttttcaggcattgtttgatggaatgctgtatcaaaaattgccacatgagggatatttggtaataatttacggaaagcacgaatacccatcaagttagctgggttgtgaagcggtgctaattcgcttaattcttcaatttccttttcaacctcatcagtaatagctactgattcagggaatttttcaccaccatgtacaacacggtgacctgttccatcgatatcgttaatatcattaataatattgtgcgctttaaaagcatccaacatgatatcaactgcctcaacgtgatccttgatatcttgtactgttttaactttttccccgttgacttcaattgtaaaaattgaatccttcaatccgattctttctattaaaccttttgttactaattcctcttcaggcattctaattaattgaaattttaatgatgaactaccagcattgatagccaagattaattttgacataagtaatgatcctccatcgtttgctttttatactatttcatttctcattttatcattcatacagttttatgactatactattacagattattttttaggacgatttgtgtccatccactgatttaactctgtcataaatccttgaaattgtgaaggatttttgaaatcaggaatatttgccaataatacttcaactggctttgtttcacccgattttttcttttgtaaaattaatatagattttcgcgctttttcatttttaaataaagttggtggtaaatttaaaaatgcttgcatctctgtctctgttgcaatatatttttcaagctgttttacatgttcacctgtaaaaatattacttggtaccactagaaaggcatatccagcatcttttaatacatttattgcttgttctattaataaataatgtgaataactatgtccttcttcaaaacctagcttaaactccttacttctttcatcaattggataatagcctactggaaaatcaccaataacgatatctgcttcttctaatggtagtggcatgatggcatcttgaggatacacatcgaaaggaatttctaagaagtttgctaaatgtacactaacacgtgataaaactggatcaacttcaattaaatgatgcataaccgcaatttcaggtaacacttcttttacagtagcacttaaatgaccggcaccacttgcaatatcaacaatatgtaattcttcttggttgttcataaaacgctcaactaaaaatcctagtatcaatccaattgaatctggtgtaatttgatgatttgcttgtatcttttcttcctgcattaaacttaaatatgcaaattggaatgctttacgtcgatcttgtaacgtcgattgttctaacaatcctctttcattggtatatacttgttccattgctagcccaagattttcaataaaactttggccattttcattatttaatgttttagctttttcatctaatgtatgaaacaagcgttccataattgtttgttgttctgccatattcgtccctctccaataaaaagtgcccataggtcttagcaatcatagaaaacaattctattttaatgctgttgacaacgatggacacgatgtatacattttaagatttatctctttaatgattaaatatttttgtatgcagctaaagcagcatcaaaatctgggaaatcagtaccttcactaacgatttctttataaacaactttattatctgcatctaatacaaatactgcacgagctaataagcgaagttcttccataacaacgccatagttttcaccaaatgataagtcacggtggtcacttaatgtaatgacattgtctaaacctgctgaagcgcaccatcttttttgtgcgaatggtaagtctgctgaaattgtaagcacaatcccctcttctttagaagcatcagagttgaatttgcgagtctgctgatcacaaacacctgtatcaattgatggtaccacactaattaatttctttttaccagcataatctgctaatgttacttgatttaagtcattatctaacactgtaaaatcaggtgcaaaatcaccttcattaatttgttgaccttttaagtggattggtccacctttgaatgttatttcagtcatatacttgacctcctgcattttaaaattctaactacatcatacgacaatttatggtttgattacaattttcatgctttaatcaaaagcaaatttaattttatacaaattgttgaatataatcaaaagcattttttaaaattaaaatagcagtaataataataaataatacttttacataaccaacaccttgtttaatagcaaaatgagccccagcatatgacccagcaatcatacttatagccataattaaacctattacataatctacttgtcctaataccataaataatacaagcgcacctatattagaagcaaagttcaaaactttagcatttcctgctgcacttaaaaaatcaaaaccaaagattaacaatacaaaaagcataaatgaacctgttcccccacctacaaatccatcataaaagccgattaatataaaaagtgctacaaatattatggctttcttaaatgtaaattgagtaaacgtacgtgtattgccccaatcttttttaagtaatgtgaatataaacaccgacgaaagtgcaatgatgattaaaggtttcaatatttgtgacggaaccatcgttgcaatatatgcgccacatgcagatgccaaaaatacaaaaccaaataatttggcaacaacaaataagtccactttaccggaccttataaactttatcgtactagttaaagaaccaaatgaacttgccaatttatttgtacctaaagctacagatggtggtagaccgattgctaataatgctggcgtagaaattaaaccgccaccccctacaaccgaatctataaacgccgcgataaaaccaaataaaattatgattataatcatcgttaagttcaaatccatagtttaacatccccttatgtttaaatttactctaggattttatttataaaaagtcgtttattaattggtttgtttgctgttctttaatagttttataatcactagttatttcaagtgtttcaatattttcaacagcacgattaatcatctcttcaaaatcaaagacactttcatattggactaccttatcaaagtttggttcggttactggatttttaggggtgaaaattgtacaacaatcttcaaatggttgaatagatgtttcaaatgtaccaatttctttcgatttaataataatttcttctttatcgtaagttaataaaggacgtaatacaggagtagaagttacattattaattgcatacatgctatgaagtgtttgactggctacctgccctaggttttcaccatttacaatagctaaagcccctatttgatgtactaatttatcagcaacacgcatcatcatacgtctcgttgaagtcattgtatatcttggatgtacaactttatttacctgtttttgcaattctgtaaatggtacaatatgcaatttaattggtccaacacgttcagctaaaatacgtgtcaattcaataactttttcttttgcttgatcacttgtaaatggtggactatggaaatgaatcgcttcaattgttacgccacgtctcatcacttccatcccagcaactggtgagtctataccgcctgaaagcattagtaacgtcttaccaccagtaccaactggtaatccacctgaacccggaacaacttcttcatacatataaattgcatctaatctaacttccactcgaatttcatgatctggacgtttgacattaacagaaatattgtcgaagtgcttcaatacagcaccacccaattcacgctgtaattcatacgtatccattgggaaatttttatcggcacgcttcacatcaattttaaatgtgctgttttcttcaaattgctgcgcaaatttaattgccgctgcactcattgcctctattgttttttctacttttaatactggactaatagatttaataccgaaaatttttgataatcgatatgttatttcatttatatctgcatggtcttcaagttcaatatacatacgatctcgtttgcctttaacgacaaacccatcaagtccttttaatgacttatttacattatttcttaattgatttacaaatttttttctatttgaaccctttaatgttaactccccgtatctaacaagcaagtgatcatacttcattattttagcaactccttaatttcctcataaatgatgataaatatttctttaaaccttgctatatcttctttagttgtagtagccccaaatgataatcttatactaccttcaatagatttgtctgataatcccattgcagccaatacttcatttaatttattacgtttagatgaacaagcactcgtcgtagatatcataatgtcatattttgaaaaagcattaactaatacttcaccttttacgccaggaaaactaatatttaaaacgaatggtgaacctgaagttgaagaattaatataaactccatgatatttatttaaaaattgacggacgtcattatttaactcagtaacaaatgcattcaatgcttcaaagttttcattagctatcttcatcgctttaaccattgcaatatcatttggcaaattaactgttccacttctaacgccatattcttgaccaccaccatggacagtaggttcaacattttgaatgtgatttacaagtaagacgccttgaccttttaaaccattaaacttatgtccacttaaactaatactatctacgttattgagatccattgaaattttgccgaatgcttgaaccgcatctacatgaaaatgtgccttaggataattttttataactttagccatttgtggaataggctgtatttgtccagttacattatttacatacatacatgttactaaaccgactttgtctgacattaattctttgaagtgttctaagttaatactgccatctttctttacatcaacatatttaactttaaatccttcgtgtgcttccaaatatcttacaacctctaatacggacggatgctctaacacggatgtaattatttccttcgctgtatcaaatttacgataggcaataccttttaaagcaagattattggattcagttgcaccactagtgaatacaacatcataatttgtttttgaattaatcattgcattaatttgggcttttgcttgttgtagtaattgatttgcctgcaaaccagctttatgcggactattcggattataatacattgattgatttacttttaaataagtatctaacacttcttcaaatgctttcgtcgttgccgcattatctagatatatcaaaataaacacttctctttcattaatcatcaatcgttaaaattgttttactcaagcattatactattatccgacaaaaaataaaggttatagcgcaaaataatcttatttctacttattaaataagaattagactatttcactctatttaaacagctgtgtgattatgcttttttcactacttatattaattaaaacaacacatttgattacgtttatctttaaacaattgctatttatatttattgtccctttcatttatccatataaaaaagaagctagacaacgtatcgttggctaacttcaattattaaactcatcagtccaatttgacagagtgctcatattatttaagtataactacatactagtttctattgcttaataacttcttcttcaatatgtttagtgacacctggctcaacactttcaagagcttgctctgcaatttcaatcgcacgcttatagcgattatttttaaataatcgttcagcttcatttaagctcttatcaacattgctatagtccttacgatatctatttccatattgaattaatttctctgcataaacagcattaacaagaacatcatttgcttcatcttcaaatgtattcatttgaatcacaattttagacactttatcttttaactgtttaacgtgtattggacgttcactaaattgttcgttaacatcacgaacttcatgatcaatttcatttttcatgatgataaacctttcaggaacgcttgttaagttagaagcaagtaatcgacgatacacttcttctttcttcgattgtactcgtagcagattgtcttctgcttctgcttcatcttcacgcaattgaatcagatgattttgtagcttttcttgtttgtcattaataactgtgacatgatcttctaaatattgtaaattatcctgaacctcgctatatcgtacagcagatttagacatttcttttaaaatatcatcatatacagaaattaaactttgaatttcattttcaaattgacgaacactttgagcatcagattcatttatatagtagttttcacgtacatattcaatttctgtttgcaatgtataattcatgtctttagctttgaataagttatccgtaatgatatcttttgtttcttcgacatcatttttagctttaacttcatgttcaattaaatcatacatgtcatctaacttatcattgatattagctagtttatcattagcttcttctaattctaagcggctaattaatggttcaacgaaactaagctctgtttttaagctttgtaatgtactgtctactttcacgtaatccagatcatacccttcaactttaagatcacggcaaccatattttaaatcttggaattgaccaggtaattctttttgagtttctctaattaattctggtatttcttccatataagatcttagctgtttcatttgttcattcaaggcagctatatggttgtgcgcttgtacataattaccatcagcttttagtacttcatattgctctaaccttggctcaaatttttcaatttcagtttcaagtagacttgctgcctcaccaaattgatgacgatttgctaaaacatcacgtttcatttcacgataatcaactttacatttgtcatataattcatcattatctttgtataacgcaataatttcatttacatcttctaattgttgctgatagctttgttcgtaactatccatcaactcatttgcatcatcaatttcactttgagatgcgttgaaactaaatttatctaataaagcctcagcattatggattttttcttccacaggagctagatacttatttgtactttctacgttgtcctttttcattgcatcgtatttcgtttttgtttcaccttttaaattcaacttaaataattgtgcaaggttttgatcaaaaggtaacgtctcaatttcatttttacgttcgattgctttttcaataatttgtcgtttatttgaacgtaaatagaataatacacctacagcaatcaatataatcacaattattgccaaaatgatatataacaccatatgcttctcctcctaatttatcattactattataacgtaattttgcttaaggataaattataaaatgaatttattgccataatattttcgaaattctatactattataaaatctatgaaaataagaggttttaaatatgacaacaattaacccaacaaactacacattattaaagaaacaagcagcaagccttattgaagatgaacatcacatgattgctattttaagtaacatgtctgccttattaaatgataatctagatcaaattaattgggtcggcttttacttattggaacaaaatgaacttatacttggacctttccaaggacaccctgcttgtgtccacattccaattggaaaaggtgtatgtggtacagccgtttcagaacgtcgtacacaaattgtagctgatgttcatcaattcgaaggacatatcgcttgtgatgctaatagtaagtctgagattgtcgttccaattttcaaagatgataaaattatcggcgtcttagatatcgatgcccctataacggatcgatttgatgacaatgacaaagaacatcttgaagcaattgttaaaattattgaaaagcaactcgcataaaaggacatcagcattttcaataaagtgttgacagttagcaggaaaatgttacaataatctttgtgtgaattaacgaaagtagcagttgtatattattgagcgctatgttgttcccaatgcggacgtgtcacgtaactgtcgctataaggtgaagacacataaaacaatatatcttagtaagcatgcaacactcttttttgtttattcataacaacaaaaaagaattaaaggaggagtcttattatggctcgattcagaggttcaaactggaaaaaatctcgtcgtttaggtatctctttaagcggtactggtaaagaattagaaaaacgtccttacgcaccaggacaacatggtccaaaccaacgtaaaaaattatcagaatatggtttacaattacgtgaaaaacaaaaattacgttacttatatggaatgactgaaagacaattccgtaacacatttgacatcgctggtaaaaaattcggtgtacacggtgaaaacttcatgatcttattagcaagtcgtttagacgctgttgtttattcattaggtttagctcgtactcgtcgtcaagcacgtcaattagttaaccacggtcatatcttagtagatggtaaacgtgttgatattccatcttattctgttaaacctggtcaaacaatttcagttcgtgaaaaatctcaaaaattaaacatcatcattgaatcagttgaaatcaacaatttcgtacctgagtacttaaactttgatgctgacagcttaactggtactttcatacgtttaccagaacgtagcgaattacctgctgaaattaacgaacaattaatcgttgagtactactcaagataatacgttcaatacaaacacccacaattgtgggtgtttttttattaatttaaaaatgatagattcaagattatatggagctaccctattttacaatcaacttagaatttacaagtcttatttgtttaattatctttagtatttcatcattagtttttaaaattatcaattgcgatatacgaatcctcatccctctatcaaattaccattcatcgtctcacttaataaataatttcggattatctgtaattaatccatctacacccatttgtcttaatttttctccagttttcaatttattaactgtgtatggcataacctgtaattgatgatgatgtgctttatcaacaaattttctggtcactaatgcataattaggattaacataactagcaatttgagcaattcttgaaaagtttggctttttataccaataattacgtttactacaaagcacacctaattcatatatactgcccaatgtgtttaacttttcgatgcattcgatatcaaaagattgtataactacttgtgtcgcatcgactttcttttcttccaaaaatgccagcaatttacattctatttctggatataaattcggacttttcaattcaatcaatagctttttatcatactttaagcataatgaaagtacttcatctaacgtgggtattcgttctcccttaaaagcaacatctttataactaccaaaatcaaatgattttaattgcgataatgtgtaatcagcaatacgccccttaccatccgatgttctatcaattgtttcatcatgtatcacaacaaaatgttggtctttggtcaaatgaacatctatttctaacatagcaacattgagccccattacctctcgataaccgaccattgtattttcaggaaaatcactcggcaatccacgatgcgaaacaatttgtaattcatctttcagtttattcagagtcattgataagtcacctttctgttaaactttgataaactattctaaaattaaactatcacaattatattggaggttaaagcaattgcatcaacatgactttaaagtccaaacttcttggcaaggcggtcgtaacaatgtcggaaacgttcaaggcgacatactttcagagaatatttctatacctgcttccttaggcggtgttggtataggaacaaatcccgatgaattgttagtatcagccgcttcatcatgttatatcatctcattagcagctactcttgaacgtgcaaagttcacagatatttcaattgaacaacaatcgattggaacagcttgtttaaataacggaaaattcagtatgtcaaaaattgtgcaccatcctcaaattcaaattccaagtgatcaaatagcacaattagaaaagcgattaccaaaattgataacaattgcagataataattgcatgatttcaaatgctgtaagaaataatgtggacataaaaatctatcccatcattcaggccaaataaaatcgttaagtgataacgtttgttcgacaatatagcgttatcacttttttaggcttttaaattttcagaaaatttgctaaaatagtgaaatcttatttataggaggcatataaatgtattatcatcaaccgttgttattaacacctggcccaacccctgtacctgatgccattatgagagaaattcaagcacctatggttggtcatcgttctaaagattttgaagacatcgcacaacaagcatttcaaggtctaaagccaatatttgggagtcaaaatgatgtacttattttaacatctagcggtacaagcgtcttagaggctagtatgttgaacattgtaaaccctgaagatcacttcgttgtcattgtttcaggtgcctttggtaaccgatttaaacaaattgcacaaacttattacaaaaatgtgcatatttatgacgtaacatggggagaagctgtagatgtcaaagatttcatcaatttcctttcaactttaaatgttgaagttaaagcagtatttagtcaatattgcgaaacatctacgacagtgctacaccctattcacgagttaggaaatgccattaatcaatttaatagtaatatttattttgtagttgacggcgtaagttgcattggtgctgttgatgttgacattaacaaagataaaattgatgtacttgtttctggtagtcaaaaagcaattatgttacctccaggattagcttttgtagcttatagccaccgtgcaaaagaacgtttcaaagaagtaactacgccaaaattttatctagacttaaataaatacatttcgtcacaagctgacaattctacaccgttcacaccaaatgtgtctttatttagaggtgtaaatgcatacgttgaaaccgtaaaagcagaaggtttcaatcacgtaatagcacgacactatgcaattagaaatgcattaagaagcgccttaaaagcattagatttaactttattagtcaatgataaagatgcatctccaacggttacagcattcaaacctaatacaaatgatgaagtgaaaataatcaaagatgaacttaaaaatcgctttaaaataacaattgctggtggtcaaggccatcttaaaggtcaaattttaagaattggtcatatggggaaaattagtcctttcgatattttatcggtagtatctgctttagaaattattttaactgaacaccgtaaagttaactatatcggtaaaggtatatcaaaatatatggaggttattcatgaagcaatttaatgtactcgttgcagatcccatatcaaaagatggtatcaaagcattattagatcacgaacaatttaatgtagatattcaaactggcttgtccgaagaagcattaatcaaaattataccttcataccatgctttaatcgttcgtagtcaaactacggtcactgaaaatatcataaatgctgctgattctttaaaagtaatcgcacgcgccggtgttggtgtagataatattaatattgatgctgcaacattaaaaggtattttagttattaatgccccagatggtaatacgatttcagctactgaacattcactggcaatgttattatcaatggctcgaaatattccgcaagcacaccaatcacttacaaataaagaatggaatcgaaatgcatttaaaggtactgagctttatcataaaacattaggtgtcattggtgctggtagaattggtttaggtgttgctaaacgtgcgcaaagtttcggaatgaaaatactagcttttgacccttacttaacggatgaaaaagcaaaatctttaagtattacgaaggcaacagttgatgagattgcccaacattctgatttcgttacattacatacaccactaacacctaaaacaaaaggcttaattaatgctgacttttttgccaaagcaaaacctagtttgcaaataatcaatgtggcacgtggtggtattattgatgaaaaggcgctaataaaagcattagacgaaggacaaattagtcgggcagctatcgatgtgtttgaacatgaacctgcaactgattcgcctcttgttgcacatgataaaattattgttacacctcatttgggtgcatcaacagtcgaagctcaagaaaaagtggcaatttctgtttcaaatgaaatcatcgaaattttaattgatggtactgtaacgcatgcagtgaatgcacctaaaatggacttaagcaatatagatgatactgtaaaatcattcatcaatttaagccaaacagttggtgaattagctattcaattaatgtacaatgcaccaagctctattaaaattacgtacggtggcgacttagcctctattgatagtagtttattaacacgtacaattattactcatattttaaaagatgatcttggtcctgaagtcaatattatcaatgctctaatgttgttaaatcaacaacaagtgacattaaatattgaaaataataaagcagagacaggttttagtaactacttagaggtagaactatcaaacgatagcgattccgttaaagttggcgcttctgtctttacaggtttcggtccaagaattgttagaattaataatttttctgtagacttaaagccaaatcaatatcaaattgtgtcatatcataatgatactccaggtatggtaggaaaaactggcgcattgttaggtaaatacaatatcaacattgcatctatgactttaggtagaactgaagcgggcggagatgcgctaatgattttatccgttgatcaacctgtttcaaacaatataattgatgaacttaaacaagttggtgaatacaatcaaattttcacaactgaattgacggtacagtcataaacaatttatgtaaattcaaaatgccaagaagacattggattacttccattgcttcttggcattttttcattattaatttcattgtaactcaatatgaaacctttggttcaatcattcacttcaagttatgctgtcaaacaacaatcaaattacaaattatctagtacacctctaagttcacctaaatgattaataacatagtcggcatgatgcgcttctaactcacctgcagcatccttaccttttaaacctgttaatgttccaataaacgttgcacctattttttgagcacttaataagtcagctaacgaatcgcctactataaatacgtcatctttatttacaatgttatcttgcttattgatataagattcatatttatcgcgattattaccatataaagctgcgatataactaaaaggattcggctttcctaatggtcgtgcttgcggatacatattctctgcttctaaaacatcacttgctgttgcaataaaatcagcctcaaaatatggtaacaatcctaaattttcaaatggcacaacagtctcagtataaggacgacctgttgcaatacctaattcgaaaccagcaccttttaaatcattcagaagtaccttaacttcatctactggtctcaaaataatttcttgataaatataacctgtcttaaaagtagttcgtgctattttcttttcaacatcttcatacaacttcgatcctaaataccattcttgataaacttcttgcgctaacgtccataatgcacccttcaaactaaataaagtagcatccgaaacatgtaactctgttgttgcaaactcttccaaagcagcataaatattatttttaccaacttttacattatccaaaaattgtaaaggtagttgttcatttaaattaaaacagtctgctaagtttgtgcttatattttgcaacttcaattcgacaggctcatcttgatacatgaatgcctcaatttcatcatgtgataactttttcaaaatatcaattaaatgaatactaaaaacgataaataacatatcccaatttgaattcagccctagcgattttaatttgtttaaaatcttatctttttgaaaaattcgattcctaatgtcttgtatatcgttatcagtcaaagtttcccaatctatatgtgaatgaagacctaaataacacttatccattaataattcatataccgttaatgcagagacatcgaaacaacgttcttcacttaaaaaaacgccatcaacatcaaataaaattttcttcacaatccccactccatttctgaaaattcagatataaatcattctactatttgactaaaaaaagcgcaaaccctattgaagttggatttgcgctttagctgtttaaattttataaatgtttttcaatttcatcagcaacctgctgtacgtgtgtaccgacaataacttgagttgaatgtttaccattaacagtaacaccaactgcaccggcgtttttaattttctgttgatcaataatagatgtgtcttttaactctagacgcaaccttgttgcacaattagttaaattaacaatattctcttgaccgcctaaaccttctaatatttgtatagcatgttgatgatatttactttgtttaatatcattttcaccaggagcaatattatcttttacaactgttggatcaactaattcattttcacctctaccaatcgtattcaagttaaatacttggattactacacggaaaatcacatagtataagatgaaaaatacaacaccttgaacaagcaacatcaatggatgatttgatactggattaattagtgataacacataatctatcaaacctgcactaaatgaaaatccagctgtccaatggaatgtagctgcgataaataaagataatcctgttaataacgcatgaacaacatataagattggcgcaacaaacataaatgcaaactcaatcggctctgtaacaccaacgaaaaatgctgcaactgaactcgctaggaaccaaccgtaaacttgttttttctgagtcgttttagctgtatgatacattgctaacgcagccgctggaataccgaacatcatgattgggaagaatcccgcttgatagcgtcctgtaataccttttatagcatctttgccactttggaatttaccaatatcattaataccaatcgtatcaaaccagaacacactattcagtgcatgatgtaatcctgtaggaattaataatctgttggcaacaccatatatgaaagcaccaaacgatcctaaaccaactatagattcaccaaattttacaatccatgaataaagtagtggccataagaataacaatatgacaactaaaaaagtacagtaaaatgcagtcataattggaactagacgtttaccactaaaaaatgataatgctaatggtaattctgtttcactaaacttattgtatgcataggctgctattaaacctattacaataccaacaaagacattgccattattcatcttttcaaaagctgaatttatttccgaagctttcattcctaataaaggcgctaatttcattggtgataatacaactgtaactaaaaaatatcctaacgtagctgcaagcgcgactgcaccatcatttttctttgccattcctatagctacaccaattgcaaataaaatacctaattgctctaaaatcgtagtacctaccgtagtaaagaacattgcgattttcggcgtcgcatgaagtgcatttaacgtattaccaattccggcaataattgctgcagccggtaaaatggcaactggtaacattaacgaacgccctaaattttggaaaaatttatacattgaatgtcatccttcttaaaataaggtagaaatataaagattactaatgtaactagaataactacttcgatactccgttatagtcacctaggcttactaaccagctatatttctacctcaagttattttataaactttttacaatttcatgcaattcttgttgtaactttgctgttcgtgtttcaatctcttttgtaatgtaatcgatacgctcgtttcgttttaaatctttaggtaaatcgttaatatcgattggtttaccaatatttatgtatgcttgtcctgttaaaagaccatgaatcttagtaggaccaacataagcaacaggtaatattggtgacttacttaacattgcaattgttgaagcaccacgtttcaaaggtgcaccttcttgcgatgtgcgagaacctgttgggaagataccaactgtcttattatctttcaacaaattgattgggcgttttaaagtactaggtcctggattttcacgatctacaggaaatgcatttaaagacgttaaaaatttaccaatccatttatttttgaataattcttttttagccatataatgaatttgattaggatataatgccatacctagcataatgacttcgttataactttcatgcgtacaagttacgacatatttactatccttaggaatattatctttaccgattacgtataatgattttgacattttaactaaaatgaaattcaaaatcttactaatcactgaatacattgtgccacctacttaacttatttgtttataacaactagattttatcactatatttttactagaacaagatagtctgaaaatacatctaaagttgtatagtgtattactagcaataattataaaaaaaagacataattaaagcatatataaatcatataatggaggttaagtatgtcagattttaatcatacagatcattctacaacaaaccatagccaaacacctagatacagaagacctaaatttccatggtttaaaacagtcatcgttgcattgattgctggaattattggtgcacttctagtacttggtataggcaaagtattaaatagtacaattttaaataaagatggttcaactgtccagacaacaaataataaaggtggcaatcaattagacggtcaaagcaagaaattcggtaccgttcatgaaatgataaaatctgtctcccctacaattgttggagttattaatatgcaaaaagcatcaagtgtagacgacttattaaaaggcaaatcatctaaaccatctgaagctggagtaggttcaggtgttatctatcaaataaacaacaattcagcttatatcgttacaaacaatcatgttattgatggcgcaaatgaaattagagtccaattacataataaaaaacaagttaaagcgaaattagttggtaaagatgcagtaactgatattgctgtacttaaaattgaaaatacaaaaggtattaaagcgattcaattcgccaactcttcaaaagtacaaactggcgatagcgtattcgcaatgggtaacccattaggattacaatttgctaactctgtaacatctggtatcatttcagcaagcgaacgtacgattgacgctgagacaactggtggcaatacaaaagtcagcgttcttcaaacagatgctgctattaacccaggtaactcaggtggcgcattagtagatattaatggtaatttagttggtattaactcaatgaaaattgctgcgacacaagttgaaggtatcgggtttgctattccaagtaatgaagttaaagtaacaattgaacaacttgtaaaacatggtaaaattgaccgcccttcgattggtattggtttaattaatttgaaagatattcctgaagaagagcgcgagcaacttcatactgatagagaagacggtatttatgtcgccaaagctgatagtgatattgatcttaaaaaaggtgatattattacagaaattgatggcaagaaaattaaagatgatgttgatttaagaagctatttatatgaaaataaaaaacctggtgaatcagtcactgttaccgttatccgtgatggtaaaacaaaagaagttaaagtgaaattaaaacaacaaaaagaacaaccaaaacgtcaaagccgatcagaacgtcaatcacctggccaaggcgatagagatttctttagataatttacagacagaaaagtacattaagagcctactcattacattcttaggaatgaatatgagtaggctctaatttatttagctatgcaattatatttattgatagttaaccatgaagtattttttcttaccgcgacgaataatcgtaaattcgccatcaattttatcttctggtgctaaagcataattaacatcttgttgtctctcaccattaatataaatcgcaccattgttaacatcttcacgtgcttgtcgtttagaagtagaaatgcctgtttcaataaggacttcaacgatatttgttgtgtcatttgataatgtcacttgaggcacatctttaaatccatcttttaattctttcgctgataatgattttaaatcaccactaaataatgcttgtgaaatacggattgcatcatttaatgcatcttcaccatgaataaatttagttacttcttcagctaatgttttttgagcttcacgtaaatgcggtgcttcatttttagattgttctaagcgatcaatttcttcttttcctaagaaagtaaagtattttaagaatttaattacatcttcgtctgattgattaatccagaattgataaaattcataaggacttgttttttcagcatctaaccaaacagcacctgactcagacttaccaaatttcttaccatctgatttagttacaagcggaatagttaaaccgtatgcgtctgtttgaccatacatacgacgcattaattcaataccacttgtgatattaccccattgatctgatccacctacttgaatcttacaattcaattctctattcaaatgaccgaaatcaatagcttgtaaaatcgtgtatgtgaattctgtatatgaaataccatgttctaaacgactttggattgaatctttacctaacatgtaattaacgccgacgtgtttaccatagtcacgtaaaaagctaattaatgaaatttgtcctaaccaatctctattattaacaagcactgcaccatggtctgttccaaattcaaaaatattgtgcatttgtttactaataccttcgatatttttatctacttgttcttctgtttgtagcacacgttcttctgatttacctgatggatcaccaatcatacctgtaccaccgccaattaaaacgataggacgatgtccatgttcttgaaaacgtcttaatgttaagaatggtagtaagtgaccaatatgtaaactatctgccgttggatcggcaccgcagtataacgtcacttgttctttatttaataaatcttcaataccttgttcatcagtttgttgataaataagacctctccattttaaatcttcaattaatacattcgtcattattatttcctcctatttataattatttattgaatacttgttaaaatactttaaagttttttgaacgtaaaaaaacccttacaacaaatatgtaagggcgcgattgcacgttaccaccaaacttaaacataatcataagataatgttcactctattaatgatacgttcattaataaacgtaggacatgttagttataaaggtgtattcatattattaaaaacactagttcacagcgaccactagctctctgatgatttcaaataatattacttgtccttttatcctattctttatgcattttccctaattataattaacgttaaaataaaagtcaaattgcttaaatatggtatactatacgtaatttaggaggttaaagatgacgaatcaagacaacaatcatcaattgaatcatcgtatatatcattttgaaaagatatataaagctatcaaacatgtcattgtttttatatttatgattttcattgccatcgttgctatcgctgtgattgcgatgtctttatattttcatcatttaactaaaacgtccgactcattatcagatgatgctttaataaaaaaagttcgacaaatacctggcgatgaattattagatcataataacaaaaatttattatatgagtataaccattctcaaaactcactcattataggccctaaaacatcaagtccaaatgtcattaaagcattaacgtcatctgaagacactttattttataaacatgatggcatcttaccaaaggcgattttaagagcaatgatacaagatatttttaatactgatcaaagttcaggtggtagcacaattacacaacaacttgttaaaaatcaagttcttaccaacgaaaaaacatatagtagaaaagcaaatgaacttcgcctagcaattagattagaacacctactctcaaaagatgaaattatatatacatatttaaatatagttcccttcggtagagattataatggcgctaatatttccggaattgcatccgcttcatatagtttgtttggtattccaccaaaagatttatcaattgcacaatctgcataccttatcggtttgttgcaaagcccttatggctatacaccctacgaaaaagatggaacattaaaatcagataaagatttgaaatatagtattcaaagacaacattatgtattaaagcgtatgttaatcgaagatcaaatcactgaaaaagaatacaacgacgcattaaaatatgatattaaatcacatttgttaaatcgaaaaaagcgttaattgatgctcactttttaaagtaaccacaacaatgcatccaaatattaaaaacagcagtaagattattttcaattagaaaatttctcactgctgttctttttatttactctaaaggaaagccattaaaccaatcaatagtttataaattaattgctttcacattgtctacaaagttaatcatacatatgctatatttagttaattatttagattcttttctgaatttaggaatgaataaagctaacatacctaataacgcatataagccccaccatgattggcttgaagttgtttctccagtttttggtagcattttagattgactaagtttgttttctttcgatggtgtgccggccttttcttttgttttcactgttttgtctacagttttatgaatatcattcggcagatgttcagttgtttttttgtcagtaactttgatagtattattataattttgtttcactacgtcaagctttgctgcttttccagtatgattatttttatcggcaatatgattcagctgtatgactttgtctttatttttattagagtctttatcagtatcgacattcgatgacataccaacgctattatcaacacccttatcagtgtctttagcaatttgagtatccatttctttaagatcatacttatcgaagtgagtgttattcatcatatttgttgatgaatgatcaatatttagatgcgcatctttgtcaacactactatcagtatctttaaccatgtcagactctggttctatcacatctgctttatcagacgcatctttaggatttgttgcagtgctgctattttcagctacatctgtatcagcaaccttatcttcttgtcctgtttgtacatttagcggttcactcgtgttattttgtgatgtatcatcatcttttgtattgatatcctgatttataattctgacatgatattgaccttcataaccaatgtttgccacaacgactttaacaatcgcattgtaaactgctttgtcaggtatatatgggaaaatcagcgttctagaattatttttaggatctttagaaacagtagtgacacgtttaccttctacaattaaatctttccagtaactgtcatcctttgttttcatcactacatatttttgaccatttaaagttgctgtatagaatggatgttcaacaaagccgtccataactgactcactattttcttcactttcaaaaacaacaaaatgcgcttcttgtaaatctgttaattgatcatttgtaggtgtaacattttcaaattccgtcactgctgatttaacttgatcagctaactctactctagtttgatctaatttctttttatattccgccttatatttttctggcaatttctcttgtaatttttctaattcataaacttgtctttctaacgttttagctttgtgatacggagctaataatttttgtaaattgtatgtttcttcatccacatagtcgtctgggttattagtaataggctgtgcaaagaccattagcgtataatcatagtcttcatggatgttctcaccatattcaatagatgacacaattttaacttctctcgtaccattagatactgggaaacgaatataggcataatctttatcagaatcatatgatactaattcgactggtaactttttgtcaccttcataaacttcaaatttcttccatgttgaagctgtctttaaacctaattcaattattggtcctgtttttgtaaaaatgacagttgctggttcaacagtactagcataatgatagaactgtctttcacctttatcatttttcatttgaaaatcaattggtcgccaattatcagctgtatgttctttatcgatgatagccgggtttttaattgcatcttgtagtgattcatctgctggtggatactgttgattaacatccgactgattacttgactcattcgttttatcgttagtattaccattagaatttgtttcatgagctggttggcttgacgcttgatctgcattcgttgacgattttggttgtgcaggttgactcatattggtcgttgcctgcggttgattattagcattgttgatcattgatgtattttgattagatgtattcgtgtttgtttgattacttgcgactgaacttgattgatcattcgttactactgcatcatttgtatctgattttacaagtgaaggatcgttataaataggtttagcaaatactaatttagtataatcataatttgtttcttctccatcatcaatttgagtcgaagaaacaattttcaattcttgtgtgccatctgaaactgggaatcgaatataggcatggtcttctggtacaggactatatgatacaagtctcactggcagtttttgattgttttcatagacttcaaacttcttccatgttgaagcagtattgatgtctaattcaacttctgctttctttttagtgtaatacacatctgctggatctttgatgctgaaaaagtgatagtactgcgtttcattgtttttatctaataactggaaattgacttgttctcttggacctatatcatgttctttattttctaatgcaggatctttaattgcatctttaagtgattcatccgctgcaggatagtttttcgcagtgtttgctggttgcgtagcaggttgtgtttgatttgtatccttaggtggctgagttgtagttgcattattattttgattttccgagattttatctgaagtatttgtattttctgctgcttgtgcttgatgttgagaagtaattaaaaatagtgtactgacaatgaccgatgcaacgcctagagttgattttctaatagaatagaaagaccttaattttgggtgatgtttgttcatgttgttaacaactcctataagattatatttaattgataataattatcaatatcaattattagtgttaattgtagcgcatcccaattaaatattgcaacctattttattaatttttttaatatggaatattcattgcatcgctttcctattcttcaagcccactttttatcttcatatacattaattaaccaccttcaaacattgtcgttagattcgccaaattgaatctatttttagcacagcaaaaaaccgaactgctgaaataatgcatctccaacagtccggtctattaaactatttacttatctttattaaacaattgacatgatttattagaataacccaattgcatgaccatcatcagtaacatccatgtttaatgctgctggttttttaggtaaaccaggcatagtcatgattgcacctgtcaacgctacgataaatcctgcacctgttttcgcttctaattcacgaattgtaatttcaaatcctgatggtgcacctaacaacgtttgatcatctgagaatgaatattgtgttttcgccatacatactgggtaattatcccaaccattttctttaaattgttttaattgtttttgcgctttactgctaaacgttacttttgaaccgccatagatttcagtcacaatcttttcaatcttttgctctaatggtaattctaattcatataaaggtttaaatgaattaggttgatcaatgacttctaatacttcatttgctaagtcaacgccacctttaccacctttttcccaaacttcagttaaggcaattcgtacgttattttctttagcccaagattttacatattctacttctgcatcggtatcatgtataaatgcattaattgcaacaaccggttctacaccgaattttttaatattattaacatgacgctctaaattaacaattcctgcttttactgcttctacattttcttcttttaaattatctttcgctacaccaccatgcatttttaacgcacgaattgtcgcaacaacaacgacagctgccggatcaaatcctgcttcacgcgctttaatgtccatgaatttttcagcgcctaagtctgaaccaaatccagcttccgttacaacgatatcagctaaatcacgtgctgtttcagttgctaaaattgagttacaaccgtgtgcgatattcgcaaatggtccaccatgaactaatgcaggtgtcccttcaattgattgtactaagtttggttttattgcatcttttaaaatcattgcaagtgcaccttccacttttaaatctgcaactgtaactggcttgcgatctctagtgtaaccaatagtaatacgactaattttatcttttaagtctttaatacttctacttaaacataaaatcgccataatttcagacgctactgtaatattaaagccatcttcacgtggtacaccatttgtaggtccacctaacccaacgtttacatgtctaagtgcacgatcattcatatctaatacacgtttccactcaatacgtctttgatcgattcctaattcgttaccttggtgaatatgattatcgataaacgcagacaatgcattatttgcagttgtaatcgcatggaaatctccgttgaaatgtaagttgatatcttccataggtaagacttgcgcataaccaccaccagtcgcaccacctttgataccaaatgttggtcctaaagcaggctctcttaatgcaaccataacgtttttatttaactcatggaatgcatcagctaaaccaactgtaaccgttgatttaccttcaccagctggtgttgggctcatcgcagttactaaaacaactttccctttgttttctcttggcgtaattttattaatgtcgattttagctttgtaatgaccataaggttctaatgcatcctctgaaatacctactgatgcagcaatatccttaattggttgtagtgttgattgattcgcaatatctaaatctgataaatgagtcaacttttttcgcccctttttgtttaatttatgcatttataatatgtaagttgtagctaagaaatttttacttacattcatataataacgaactgttaaaaacttgtcgactaaatcgggttagcgctttcatttttgcaataaattcacttattaaagttttgtattatacaacttttagcgcttgatactattgataactatatttttctattatttaaaatagtcatattccaaagatcatattaaaaataaaaagcaatataaagatatgccattattgttatgtcatcattttcaaatgctttctacgaaatgatatgacacaagttaacagctctttatattgcttatcataaagtaaactaatatttaaacattaacatgaaatatgttgtctccctttattcttcgaaagaaatcttcaataacattcatgtcattattccattgtacttaaatcccctgcatctaaatttaattcccaagcttttaatacacgtctcataattttacctgagcgtgttttaggtaatttatctttaaattcgatttcacgtggtgctgcatgtgccgacaaaccttctttaacaaataaacgaatttcttcttttaattcgtctgttggttcatatccttttctcagtgcaacaaacgccttaattatttcaccgcgaactggatcaggtttaccaataattcctgcttcggcaactgcttcgtgttcaaccaatttagactcaacctcaaatggtccaactcgttcaccagctgtcataattacatcatcaacacgtccttggaaccagaagtaaccatcttcatctttatatgccgaatcaccagatacataccagtctccaataaaatatgacttatatttttctggattcttccagatacgatacatcattgatggccagcctttttttatagcaaggttgcccattcgatttggtggtaattcattacctgcatcatcgataattgcagcttgaataccaggtaatggtttgcccattgagccaagcttgacgtccatcgttggatagttaacaatcatatgtccacctgtttctgtcatccaccaagtatctaacaccgttaaaccgtatacttttttcgcccattttataacttcaggatttaaaggctcacctactgatagaatcgaacgtaacgatgacaagtcatatttctcaacaatatcgtcaccagcactcattaacattcttaaagctgttggtgccgtataccaaatcgtcactttaaaatcttcaatcatactataccactgttctggtgaaaagcgaccaccagctatacaatttgtagcgccatttaaccatggtgcaaaaataccataagatgttcctgtaacccaacctggatctgctgtacaccaataaacatcatcttcttgtaaatctaatacatattttccagaaatatagtgcactaacattgcttgttgaacatgcaatacacctttaggttgcccagtagaacctgatgtataatgtaaaatcaaaccatcatccgactttaaccattcaatgtcaaattcatcgctagcagtttccatcaaactaatgaagtctatgtaattgtcttctacatcctcatctacgacaacaatttttttcaagttcggtaatttatctacaggtactcgaggtaacaatgccttattagtaattaacactttagcttcactgttctctaatctatcagcaactgccttttccataaatgcttcaaataacggcccaacaattgcaccaatttttaaaacacctaacaacgcaaaatatagttcaggtgtacgcgacataaatataaatactctgtcacctttgtcaacttctgcatgttcagacaaaacattcgctgctttattagataaccgttgcatatctttataagtatacgattcttttctgtgctcatctttgtaatttaacgctattttatcccctaatccttgatctacatggcgatctatacattcatatgccatgttcatttttccagtttcactccaagaaaatgcttgttctacgtctttccaatcaaaagtattatatgtttcttcataatctttaaggttatgtttgccttgcgctcctttataaacttcgactttcatttgaaactccccctttgttatgtgaaaacgctttctttctcaatattatacataacatttctaattattcaaaatttttacttttattctttttctagtattaattattgtaaattttctatataatgaatttaatacaatcacgacgtcgattgaggagttgaaaatatgaatcatttaaagacgtatcaatccgaagattattacattcatgacaagcaatttgttattgaaggtcctttaacatacgaagatttgaaagcgcttactttcgatgcgcatttaaccgcatttagagatgctgaagatcagtatgaagctttgttagaaattacaacattaccagaaggtagaatttatgttgctcgccaagatcaactcattgtgggttatgtcactttccactatcctgatgaaattgagcgctggtctacaggtaaccttccatatttaatcgaattgggggcaattgaagtcagcatcaattttaggcaattacaacttgcggaaaagctgatacaacttagcctttccacaccagaattcgagaattatatcgttataactacagaatattactggcattgggatttaaaaaattcaaagttagatgtatttgactataaaaaattaatgcagcggttaatggcaactggtggacttgaaatattcgctacagatgatccagaaataacaagtcatccagctaattgtttaatggcaagaattggcaaaaacattacattagaacagcaacaagcgtttgatgatattcgttatatgaatcggtttttcttttaatttttggaatatcggagggattatatgcaacaacattcatcaaaaactgcatatgtttattcagataagttattacaatatcgatttcatgaccaacatcccttcaatcaaatgcgtttaaaattaacaacagagctacttttgaatgcaaatttattgtctccagaacaaatagtacaacctagaattgcaacagatgacgaattaatgttaattcataaatatgattacgtcgaagctattaagcatgcttcacatggcattatcagtgaagatgaggctaagaaatatggattaaatgatgaagagaatggtcaatttaagcatatgcaccgccatagtgccacaattgttggaggcgctttaactttagcagatcttattatgtcaggcaaagtattaaatggttgtcacttaggtggtggtttgcatcacgctcaacctggtcgagcaagtggtttttgtatatacaatgatattgcaattaccgcacaatacttagctaaagaatacaatcaacgcgttttaatcatagataccgatgcacatcatggagatggtacacaatggagtttctatgccgataaccatgttactacttattctatccatgaaaccggaaagtttcttttcccaggctctggtcactatactgaacgcggtgaagatatcggctatggacacactgtaaatgtcccacttgaaccgtatacagaagatgcatcatttttggagtgttttaaattaacagttgagcctgtcgtaaagagttttaaacctgatattattctaagcgtaaatggtgtcgatatacattatcgtgatccactaactcatctaaattgtacgttacattcattatatgaaatcccatattttgtaaaatatttagctgatacttatacgaatggaaaggtaattatgtttggtggcggaggctacaatatttggagagtcgtaccacgtgcatggagtcatgtattcttaagtttaattgatcaaccaattcaaagtggttatttaccgttagaatggattaataaatggaaacattattcatctgaattattacctaaaagatgggaagatcgtttaaatgattatacctatgtcccccgcacaaaagaaattagtgaaaaaaataaaaaattagctttacatatagcgagttggtacgaatctactcgtcaataagtaacctaatctgcaacgattttaaaagataaataaaaggcattcttccaacacccatataattcgggtcgttagatgaatgcctaattttgtgaatttattttgtagttcctcggtattcaattctgtgaggtaaaactacatttggttcttctatcttttcatcgttcatatattttgttaataagcgcatccctactgcaccgatatcatataatggttgaataacactagaaagttgtggtctaaccatctcaactaaacgtgtattattgaaactaataatttgtaattcctctggaactttaataccagcatccattgcactatgcataataccaatagcttcttcgtcactgatacataatatagcatctggaagattacctttcattttggcaaaagcttttacgccttctttataactttcagcaccagaacaattcaatgtatcacctaattgaagaccatttttatttaacacttcagttaaaccttctaaaacatcttcttgagcttttttagaatgttctccacctactaaagcaaatgatttagcgcctttttcaattaattctcccgtaatttctttcgcagcttcagtaaaatcaatattaactgatgctatatgtgcatccttaccatttgttcctgatactactacaggtacagatgattgatttatcaattctttcatttcttcagtaattgtaccaccaaggaaaataataccatcaacctgtttacttaataagttattaaaaatttctttttccttttcaggatcgttatctgaatttgaaataattgagtgatatttatacattgttgcaatatcttcaagtccacgagcaagttgtgaataatagatattagatatatctggaatgatcacacctactgttgttgtctttttactagctaaacctctagcaacagcatttggacgataattcaaacgcttaatgacttcgttaactttatttttagtttctgctttaacattttggttcccattaacaacacgcgacactgtggccatagagacacgcgcttctcttgctacatcatatatagtaactgtcataatttcctccttgtaaacgttttattcattataataacatgttttcatttcattttcatagtttaccatattttaatttacagtaacatatttttgtttggaaaaatttagcgaaaaacttgaaataaaaacaaacgctaaatgataacgaacgatatattttaattttatataaacttttttcatttttaattgtaatgttttgagaaagccttttcaaatatcaattgcatttgttgaaaaatgttcacatttcagcaacaaatgtgtgaatctattatattttacagataattcatagttataattttaattactgctatcagtcataatctttaataattgtgaaattgaacaagtgtcgaagtattataacaatcgttaagtgcagtatacctttatttctatacaaaaaataatagccactctaaaagtaatatactcttagaatggctgtaagtttaaaattgtcgattcaaagataatattctacttcaacatgacatattagttaagtagtctatagtttccttggaatattattttaactttttagcgttatataaatcagctaaaggctttaattcatcataaaatgcttggaattcatctaaatccatttgttgacccgcatcactaagtgcaacagatggatctggatgcacctcagccataactccatcagcaccaactgctaatgctgctttcgcagttggtaacatgatatctttacgacctgtactatgcgtaacatctaccatgactggtaagtgtgtaccttgttttaaaattggtactgctgaaatatctaaagtgttacgtgtcgccttttcataagttcggattccacgttcacataaaataatgttttgattaccttgtgaagcaatgtattcagctgcataaacaaactcttcgattgtagcagataaaccacgttttaatagaataggctttttcgtacggccagcttcttttaataactcgaagttttgcatattacgtgcaccaatttggaatacgtctaaatactcatcagccacttcaaaatcatttggatttacgatttcgctgacaacatttaaatcatatttatctttaatctgtttaagtattttaagtccttcaacacctaggccttggaaatcatatggtgatgtacgtggtttaaatgcaccgccacgaataaatttttcacctttagcatgtaagtttttagcaacagcttcaacttgttcaaatgattcaactgaacatggcccaaatacaaatgatttattgccgtctccaataatgcccccattatcaaatgttacaatcgtatcttcaggtttcaacttacgtgatacatataaatgtttttcattttcagatttttgtaaatctgtagaggctttgaaaatttctttaaataattgcttaatagtattatcgttgaatggtcctttgttactatcgattaagtcgttaagcatttctttttcacgttgtggatcatagatacgtgtaccttgttttaatttttcttccccaattttttgtgctagttcaccacgtttagataataagtctaaaatttgatgattcagtgatacaatctcacttctgtatgattctaatttattactcatccttactcacctctactaattatttcaagtatattccactttaaagcaataaaatataatgttaaaaaatattctaacaatatcatatgtatagttcaaccctaaattgacagaaaataatcaattttctaattatatgattcgagactgacatttcgattttctcagtcattattggaaagttatattctatattgatatttattagcaaatgttaatcaattaaataagtgtcattattatagcttattttgagtcaacattactgcttttaagaaaaattttcgtttctatcttctattataaatctaaaattctcatacattcaacctaacgcttaataaaaattaacaacctttgtctttgtatattaatataaatctatattgaacatcactcaccaacacattcagctatatttaaattagtgaacgtcattgtaccttctaagattcattgtttatttgattatcgaatatttttccatcttcagcttaaaatgtgcaatatcactattgtaatctaacgatgttacaaacaacataaatacatggaatgattgcgttgcctttcaaaataaactgatgatatcaaaaaaggtaagcacctgaatgcctaccttttattttgaaattcaatttttaaaaatataatacatagcttactgctatgattgattattaaacgattttagtaatcttagtcattgaatgtacgtttttctattttacttttagctttttcaactttagcatttgacgtttttgatgcattggatgacttagcatttgttgtttttgaattcttattactaatttgattattcttttgagttgacttacttgaactactttgtttcttagcaccttgtgctgatttcttattatgttgctttttctgacctgaagttttatttgtagatgcttttgatgcatttcgtttatttgaaggtgttgtttttttagattgtttacctgatttcttgtcaatagctgtattattagttgttttttcatcagctttacgtgtaataacaccattttcaaatttagcttctttttgtttaacagtgtctttattatctgtattaactgtctctgatacgtcattctttttagtaactaattgaggaatttctttcaagtcatttttagcaactggtttttctgcaaataacgcttcagttaattgactctcttttgaacctggtgttaatttagcttgcttctgttttgcagcgtttgctaatctttcagcttgtgactctggttttgatacttctacctttgctgcacttgcatctttagttaatgtgtcactgtctttctctgcttgtgcttcttttttagcttcttgaacctcttgtgcctcttgtgatgtatcacttaaattatttgcacttgcttcttcttttatcgctgcttgttgtgctttcaatgccactgcttttggttcttcatttgatacagctgcacttttatctgtttctgcttgtgcttcttttttagcttcttgaatctcttgtgcctcttgtgacgtgtcacttaaattatttgcacttgcttcttcttttattgctgcttgttgtacttttaatgccgatgcttttgactcttcatttgatacagccacacttttatccgcttctgcttgtgcttcacttttagcttcttgaatctcttgtgcttcttgtgatgtatcacttaaattatttgcacttgcttcttcttttatcgctgcttgttgtgcctttaatgccgcttgctcatttttagatttgtttaaaaatccttcaacacgttcttttgtataggcaaccgtttcttcaagttgcgtttttctttcttcaaacttttgcgacagttcttgttctttgacttttaaatcatctgctttttgataaactttatttttaaaatacaaacctaaagctgaaccaacaagcgcgccagttataaaactaacaacaaaatctttacggtttggtagtggttcattttgataagtgtgtttattttttaatgttcttttatcattttgttgctgcgtcatttgtatatcctcctataacaaatgcacttaaataagtaacaacctcatttaagtgcatttgtttaattattaattatttatctactcgagaagtatagctatgatttgcatcagttgctacattattagctttgtaatttgcacttccacgacggtagtgtctattttgccatttgtctgcaatttccattgcaacatttgaccattgaacaacttgtgagattttatcttcattttgagaaatattatgtgtaattgaatttgttacacgatctacagagctgtttaacgtttgtactgagtcaccgatacctttaacagcatctacaactgagtttaaacgatctactttaccttggatatcctcagttaaacggtttactttatgaagtaaatctgttgtttcacgagtaataccttgaacttgaccttctacaccgtcaagtgtttttgcaacataatctaagtttttcttaacagaatttaatacagctacgataccgatacataaaattaagaatgcaatcgcagcgataattccagcaattggtaaaatccaatccattaaaaacgcctcctaattaacatgtaataatgtcattaataataaatacccatactactctattataaacatattaaaacgcatttttcatgcctaatttatctaaatatgcattttgtaatttttgaatatcacctgcacccataaataaaataacagcattatcaaattgttctaatacattaatagaatcttcattaattaacgatgcaccttcaattttatcaattaaatcttgtatcgttaatgcgccagtattttctctaattgatccaaaaatttcacataagaatacacgatctgctttacttaaactttctgcaaattcatttaaaaatgcttgtgttctagagaaagtgtgtggttgaaatactgcaacaacttctttatgcggatatttctttcgtgctgtttcaattgtagcactaatttctcttggatggtgtgcataatcatctacaataacttgatttgcaattgtagtttcattgaaacgacgtttaacaccaccaaacgtttctaatgcttctttaatatttgtaacatctagcttctctaaataactaatcgcaattacagctaatgcatttaaaactgtatggtcaccatattgtggagacaggaagtgatcataaaactcaccatccacatacacatcaaaagcagtacctttatccgtaatttgaatattttgagcataaatgtcatccgaatctttaaatccatagtaataaattggaacatctgcttcaattttacgtagatgttcatcatccccccaagcaataataccttttttaacattatgtgccatttcttggaatgcatcaaaaacatcattaatatctttaaaataatcaggatgatcgaaatcaatatttgtcataattgcgtaatcaggtttataacttaaaaagtgacgtctatattcacatgcctcaaaagcgaaataatcactttcaggcaatcccatacctgtgccatcaccaattaaaaatgaagtttttttatcaccattcataacatgtgataataaacctgttgtagaagttttaccatgtgcaccagttacagctactgaagtatattgatcaataatctgtcctaaaaaatcattataacttacaacatctaatttcaattgatgtgcacgtactatttcttcatggctactcgcgaatgcattaccttgtataactaccatatcttcttttatgttattagcatcaaatggtaatatttttatccccttatttctaagagcaacttctgtaaatacgtagttctcaatatccgatccttgaacttcatgtcctaaatcatgcatgatttgtgctaatgaactcatgccagaacctttaattccgacaaaatgatagtgtgtcattatataaaactccttactcataattattctttatttaaatctgcttccgtaacataaacatcccttggttttgaaccattagcactcgaaacataaccgagttgctctaattgatcgataattcttgctgctctattatagccaatttggaaatgtctttggattaatgatgttgaaatatgtccttcattaaccataaatgcacaaacatcatcaaataattcatcttgtgattgtgtttgtgtttttttcaacaattctttttcttcaaatagatagtccggttctctttgttgtttgataaaatcaacaacatcatcaatttcgtcatcagaaacaaatgtaccttgaactctaatcggtttattcataccgctaccaagatataacatatcgccatatcctaacaagcgttctgctccaccactgtctaatatcgttctcgaatctacacttgatgataccataaatgcaattcttgttggtatgttggctttaattaaacctgtaattacattgacagatggtctttgcgtagctactaacatatgaataccacatgctcttgctttttgagcaattctagcaatagactgctcaacttcttgcggagccatcatcattaaatcagccaactcatcaattacaatgacaatttttggcattctttcatcatatggtgcttttttgttaaatgctgttatattgcgtacatggtaatgtgcaaataacttataacgtcgttccatttcttctacggcccattttaaactctgtgtagctgctttgacatctgtaattaccggtgcaactaaatgtggcaaaccattataaggagctaattcaaccatttttggatcgataagtaataatcttaattcctcagggtgatttttatatagtaaagacatcaaaatactattgatacaaactgatttccctgatccagttgcacctgcaattagtgcgtgtggcgttttagcaatatccataagtaatggttcattattaattctataccccatcgcaactgttaatttagattcagcatttttaaaacttggagattcaataatagaacgtaagttgactgtcgttggattttggttcggaacttcaataccaacacgactagttcctggaataggcgcttctatacgaatatctttcgctgccaatgccattttaatgtcatcttgtaatgccgtaattcttgaaactttaacacctttttcaactgataattcaaatcttgtaacacttggaccttcagttacatcttgtacttctgcaggtacattaaagtaaaataatgcgtcattcagttctttctttttatctgtaatccagtcctcgtccgactcaataacttgtggttcttctagtaatgaaacacttggcaatttaatatttgggcctttacgaatcatcggcttagatgtttgtacagcttgatttgttgcaacatctgattggttcgtccgaggtctattttcattagctgtatcttcattttgatttgaaaatgatgactgtaaatctttttgttgatcatcattatcttgttgtccactagtattgtttggatgtgttgtttcttcgctttcttcagttatgtcgcttacttctgaaactgaagacgaagttgattgatcaacttgctcattttccaattgattatcatcttgactttcttcaaatatttccgtttgagttgaatcaacagaaggtttctgctctgaatattgttgtgcattttgataatcattttctgtttctgcatgaccaataagttgattgttctcaacattgtttgatgtcatattatttgttttatatgcatttgtatttgactcttgtgaatcagtgcttgatgatggtgtggcttgactcgcaggcattctttcactcacagcttgcttactttgtacaggctttaattcaggcacattgacttttgaatgctttttacgatccatcatacgctttttatcagatggcgtcatgacaacattaaatggtcttttacttaaagttgaaaccttttcagtctgtttctttggatttacgttttcaatagttttctcttcgacattttgttcactttcagctgcttcgttttccacattttctgtaatttctgcgttatgcttttctatttcattcatgcttgaatcttccacaacatgaccatcattcacatcattcgttttcaatgagttgacacttaagtttgtttggtcatcttttttatgacgcggtgctaattcaatttcattatcaaccgttttatcgatattattaacttgagattcagttactacgtgctcttgcgttttaggagcgtctacatgcatttcagacgcgtttctattggtattatcttcgatatttgaagtagtatcctcttctacttctgtatcatttaattcataaaattctgcatcatcgatttgacttcctgaatattcttctttattcgttgctccatcttcttctgaatcagcaattaatctggattgattttttagttcatctttatcatttacttcaacgttatgttgtagtgctgattgatgttgagacgttacattcgaaaccgtaacttcatcatctgacaattgttttgttgtcgatacttgattcaaactaacttcctcataattgtatggactttcatctacatgagtgtcattagtgtcttcattttgtattgacgcttgtttattttcatcatttgatacagtttcattctctatgccatttgtatgaagctgactagcatctgtactattatctattaagtcactatcatcatttaatgaactatcaccaacatagcgttccgcttgtttagcatacatttcatcaattgcacgttgtattgcatcttgctcttcgtttttatgttcttcacgcttttgttgcaacgcttttttaaatcgacgcttttgaagcactttacgttctcgttcacgtctaatttcttcaacaatttgtgaagcataaatattttcaattttgatagtattatcaacttttgaataattaggcattgattttgttgttgatgatacattttcatcagatgatttagatgcagttccttgtttgacaacactatcattttgtttttcttgttctaattgtttattttgagacgtttgcgtcttagctacatatttatcatatttttgtttatctgactcaactttttctgaaggtttacttacagggatacgaccattttctaactttttaggtttcattgtgccaaaaatagctgacggtacctctgaagtcttgaaactttctttgtgataatctggagttgaatctttagcacgatgatttgtattattagaatacatattatgtgtttttgacttgtgcgtttccttctcaataccattaattgcagaaacatatgtacctggcttattcgtatggtaatgtgaatgatctttatattttatactttgctgtgatattttagaattcccacgttgttcactataattttgttcttcagttgtttgatttcttctacggcgatgtcgtttttgtgaacgagaatcgtggctttgtttgcgatagtctcgatggtattgttctttttcatctgaaatagtatctgcagattgttcaacattttcattttcataagctacgctcataggaaaacggaattttcccctcggacgactataaatatcattattttgaggcagtaatgagtcatgatcgttatctatattttgtgattcttgacgtctttttttctttctatgaatcaagtcatcatttgaatcattatcttcgccgaataatttatcaaaccagctcatattttcactaccttccttaattattcaaaaaatgcttgtccaatttcatagctgtcatttaataccataatacctttttcttcaggtgcattaggtaaattcaattctttcattgaacaaatcataccgcttgaggcaacaccacgtaattcagcatctttaattaccataccgctaggcatcactgcacctactttagcaacaacaactttctgtccagcttcaacgttaggcgcgccacatacaatttgtaatgtgtcatttccaacgtttacatttagtacacttaatttatctgcatcaggatgtttgtctttagtttcaacgtagccaactacaaatttcggtgatagatcagcatttaatttataatcaaaaccagcttctgaaatacgcttttggaatacatttacaagttcatcagttaatttaatatgacctttttcttcaattgttatatcttttgagatttcaaaaatattataacctacaacattaccttcattagtaatttcaacaacattaccttttttattgtagtttaattcaccttcaactggttcaatttgtaaaaatgcgacatctcctacatatttaggattgtaaaataaattcattatgacaaaactccttatccaattatttctatttatctttattaaatttacgacgatttgcttctaaacgctgaatcacgtttggatctcttttttgtttattatttttacctaaaataaatatcggttcaagatgaccctgtttatatccaaaggataatgatgtaattggaactagacctttagtgaaaaattccattgttaaatgtgccatcacatcatatcctgttttattgcgtatatctgcaataattaacacatcttggtgtggcactgctacgagcatttcgccttgacattgtgcctcaatttcatttaaaaatgcagtatttagtatcctacttgcatcatacccgtcatttgagttaataaaataaaaaatattaccttttacttcatcagtcgtatatgaatttgacaattttctaacattaaacagagacatttctcttatttgttgttcagttaacttcaaatcctctaacatgctttcgtcaattagacgatatgatttccctaaatcgactgcataataaactgctgtttctgcagtatgctcatcatagataaaaggaacaccttgtttagtttttttatcaaagctagtcgctctaatgacaggcataatttgactagatgatatactctcaagggttttatctgccatttgtgcaatagcttcatcaacgtaataaacaatttcatctacaattttttcttttttatcttcatattttgcgactatagcgttaagtttaatcgtgatacctttgttattatctgttcgataaatacgcaaagtttcttcttcacgattaaatttaaaatcaacgtctaaatggcttaaacgttcctttaatttatctctcatttgaaaggtattcatatgtaacactcctaatttcgcaccttataatagtttacaataaatcaacacatagtaacagagaaaaacgagtattaccccgtttttctctagtctaaattacacgtattgagctaaaaatgcatctatctgttcaattgattttcgttcttttccaatataacttccaagcagttctccatttttatatactagaaaacttggaatacccataataccattttcaatacaaatatccataaatttatcacggtctactgatacgaagtcaaacataggatatctcgcttctaattccggtaaatctggttctatcactctacaatctggacaccagcctgcagtgaattcaaatactgtagcaccttgttttaaagattcaaattgttgttctgattcaagttgtttcatttttatgtctccttaattaatgattatatataactatttagagataatagttgttattacccgattatttatattgtaatgtttctatttgattattatctaaattacaaatggcttctgaaagtaaagatctagctgcaaaatagtctcttatatcaaatactgagtctgtactatgaatatatcgtgcacatacaccaattactgcagtcggaataccaatattagctttatgaatttctccaccatctgttccacctggtgacatatagtattgatgttcaatgtcatgtgcttcaactaactttaataaatagtctctaaatgcaggctttaaaatcattgtaccgtcttttatgcgaattaacgtccctttaccaagttcaccagataatggttggtttcctttaacatcattggcaggtgaacaatcaactacaaatgcaacgtctgggtctatcatctctgcagatgctttcgcacctcgtaatccaacctcttcttgaacatttgcgccaacatacaagtctacatctaattctatatcttttaataattctagtatttcaattgccaagacacaaccataacgattatcccatgctttagcactatatcgatgttcagataactgtgtgaatggcgtgtgaggtacaattgtatctcctatatctattccgcgctcacgcacctcatcttcattttgagcacctatatctaatgttaaatctttaatttccggtgcaccttcactaccagtacgaaaatgtttaggtatattagaaacaacaccgataattttatcgccatttctatttttaattactaagcgttgtccttgccaaatatcatttgcaacaccacctaaatttgtgaattgaatcattccatttttagtgatatttgtaatcataaatccgatttcatccatatgtgctgcaatcattacacgttttgcatttggatttttagattttttcacaccaaaaaatccacccatacgattttcaataaattcatctacgtacggcgccatttgctgagtcatataattttttacttcttcttcaaaacctggtgccccatgaagctcagttaaagtttgaattcgttgtaatgttacttttttatttatgttcataaaagttctcactccttataagttattatatcatcttcaatatggtaaactaatgatatgaatttgaaatcaagggagcataaatgatgactaaactgaaatatataattccaacaataattgcagtagccattgtaattatttctaccatttcaatcatccaatatattaatcgtaaacgctataatcccgttaaagtacttaatgaagtaaaatcatattttatgaatgtcaaaggctcatatatcgtttatgaaccattcgttcatcctgaaactgataaataccgtttagtttatcaaggtggaattacaactattaaaaatggtcaaaatattcattatgatttttatgcagatgcatatactggtgaagtcattaacattgtagagcgttaatacgaattttatccatatttgatttggatcgtaaaacttaaaaatgagccacaccctaattagtaagattggatgtggctcaattttttatttttgaaaatttgtttagtaatacatctttattttagttattatcaactaatgtttcacgtaaaatatatgcatctatgttttcaccatcatcgctgtattttacagcaaagtagttttcatcatgataaaacaagaaccaatattgttgctgaataaaatatggtatcatgcgttctttttcacgaatcgattgcataggataatcatcatatgccgttacccatagaggatttttatgtgcagtagttgggaatatatcacccatatgaactgctttatctccttgactttcaatcgtaataatcgtgtggccaaagctatgacctccactatgttgcatcttgatacccggaaccggttcaaaatgtttttcgaataaaatcaacttgttactataatcgcctttattcttatcccagtaagttgatttacttcttatattaggtgcaataaactcatgccactcatcttgttgcacaacatgaatcgcattttcaaaaattgcatgtcccgcttgatcagtcaaaccggcagcatgatcaaaatgcatatgtgtcattagcacataatcaatatcctttggcgttaaattataatttgccaaatcagcaattatatgactttcttcatctactccaaaattacgtaattgcttttcagataatttaccattaccaatacccgcatctataatcaaattatattgagccgtttgaatcaaaattggatgtgtcggtaaattgatttgatttcgttcatttgcattgtattgctttgaccacaacggcttcggaacaacaccaaacattgcaccgccatccatttttgtattgccaccatttagataatgaatagatatatccccgatcttcataacatcacctattctttctgtattcgttattacaattagcatgtgtttattacatcatatcactattcataaatgcgaacaaaaacgaaacgccccacactaatacacttctaactacttataaagattaatgcaatcatattatatgtaaatgcatcataaccatcggcctgtaattttaaattaataattaaaatttacaagtaaaatgcaagctttattcttttaaatcaaaggtatttagtataacattgttcataggcgcattatctcctttagttatttgtttagtcacttttaattatagagataattgcgctttttttatattcaaaatcaaaaaatcggacagatgaaaagttaaaaactttttccatcagtccgatttattatagaacctttatctatagaaccattatagtacgaaaaaacacttatgattgtatgtgtacataccctcataagtgctctatttttgtgaatggaatttcgcttccatacgataaatacgtgaccctttatccgaaaatttcttttcatattctgttaaaatattactgccatcgtcttcttgatgtaaatttagatttatttttgtaaaatacattccaaattgagacatactttctaaactgtaggcaaatagtcctctgttatcagttttaaaatgtaaatctccttcatcatttaagatttgttgatacaacgctaaaaacgtatgatacgttaaacgtcgttttgcatgacgattttttggccatggatctgaaaagttcaaataaatacgcgaaacttcgccgtctttaaaatattcatttaattcaatggcgtcattacaaataatctttaaatttgttaaacccatctctttaactttatccaatactttataaacgatacttttctcacgttccattgaaatatagttaatatgaggattttgagcagctaatgttgtaataaactgccccatacccgaaccaatttcaatgtgtatcggttgcgttttatcaaaccattcagtcattttccctgcatgttgaccgtccatgtcaaccaattcaggatgatcttttaaataatcttcagcccatggtttgtatcgaactctcatattttattctcctcttaaataaacatgttactattcataacttcatttaggaatttaagccaagtgttcatatccttatatcttttttgctcttcataccattgaacaagacctatagattgaattaccgtataccatttcatacgtttatttaaattcaagctctcttgaacaccatatgtttcaagccattcagaccattgttgttgtggaacatagttgtaaagcagcattccgatatcaattgccgggtctgcaatcattgcaccttcccaatcgactaaaaatagttcatcacgatcagataataaccaattattatgattcacatcaccatgtacaacagtgaaaaaacgtgaatctaaactcggcatatgctcttctaaataggttaatgattttctcacaatatgatgtgttaaaacttcccttgataaagaggcattaattttattaagcataatctcaggagtaataggttccatttccatacgctttaacatacttaataaaggtctagaattgtgtatcttctttaataaatgtgcaactcttgtttgcttcatttcgtttgaagatagttcacgcccatttttccaatgttgtgctgtaacaacctcgcctgtttctatgcgtttcgtccatactaatttgggcacaataccttctgctgataatgccgcaataaatggatttgaatttcgttttaaaaacaacttttgtccatcttgttcagccatatatgcttcaccagatgcaccacctgctgaatcaagtgtccaccctaattgataaaactgctccaactcgtccacctcactttcaattagaaaatggctctagaaataggtttttcaagagccatatattctaatttataacaccatactggtacaaatattatgtccagataattattgtaaatcctaaactaatgcctacattaaacaacttaaattaaatcaatatgtctgtcattgacaccatacattctaaagtcgcttacatgacatataatgttaccgtgtctaaaactacatgtttttgaatctctgtaggcgataaactctagttttcaaaataattgctatcccattttcatggttagcataaatttatgaactgtaacatttacgtacttagtaaaatatgatgcacatcatatttgtaactcatagaaaattttataatttttatcattatatttcaactgaaaatgagaaacaaaatggcactttttactaatatgtgttttctaaacaacacttttaagcttcgttttaaattataacataattcacttacgaaagttgataaatttaagtaatttaatctaaaaatatgatgaaagaattttaaatactgtgtgactctatatacttttcaaatccttcttgtagttgacgtgtaattgggccaactttaccatcattaactggttcaccatctaatttaataacaggtgtaacctcagctgaagtacttgaaacaataacttcatctgcgtttttcaggaaatctacagtaaacgtttcttctttaaatgggatgttatagtcttcggcaatttttttaattacaattcgtgtaataccattaagaatatagttgttaatcggatgtgtataaatcacaccgtctttaattgcataagcattacttgaagatccttcagttacagtttcacctcgatgttgaattgcttcaactgcattatatttcacagcatattcttttgctaatacatttcctaataagttcaagcttttaatgtcgcaacgtaaccatcggatatcttcaacggtaacaccattcacaccattttctaaatgatcataaggacgatcataactctttgtataagcaacaattgctggttctacttcaggtgtcgggaagctatgattcctttcagctacaccacgcgttgcttgaatataaattgccccagtttcaatttgattcatatcaactaatttacgagatagttcaattaattcttctacagaataatttaaatctaaaccaatctcattggcactacgtaaaaatctttcataatgttctgttactgtaaataacttaccattatatactcgaatgtattcataaataccatcgccaaatacgtatcctctgtcgttgtatgaaacctttgcttcacttggacttacaaactcaccatttaaaaaaattttttccatatattattcctccacgcataatgaataaattgcttctaagtaaatactagttgcgttaaataactgttttttagtgatatattcatttttctgatgcattaaatcttcagaatcactaaacattgcgccaaatgctacacccttgtctaagtttctcgcataagtaccgccacctatagtataaggttcagtcatatcatttgtttgatttctatatgcagtaactaacttttgtacaaaaggatcatttttatcaacataatgtggtggttggactttacctaatttcacttcaaagccatattgttgaatctcatttgcaaaacgatccatagctttttcaaattcaaatccttctgggtagcgtaagttgataccgaaaagacctgcgttttcattatcatatgtaataacaccaatgttagttgtcacgtcacccatgacatctgtatggaatttcattcccatcttttcaccaaaatctgaattaaataagtagcgattactaaatgctacaaacgcttgtgcattattatcaagatttaatgatgctaagaattttagtaagtaaagacccgcattcacaccgatagatggatccataccatgaaccgctttaccttcaactgttaaaactagaatgccactatcaacagtactatcaccttgtaaatgattttgttctaaaaagtactcaaagtcttgaataacatctgtcatattttctttaacaagcactcttgcttctgcatgatcaggcaccatgttgtaacgttcaccagatttaaaagttattaattcataatcaggttcatcttgatcttcagcaagcttattttgaactaagtcaaatgttgtaatgcctttttcaccatgaatacacggaaattctgcatctggtgcaaaacctaatgttggcatttcttctgttttaaaatagcgatccgtacatttccaatcagattcttcatccgtaccaataatcatatgaatacgtttcttccaatccacattcatatcttctaatatcttaattgcataataagcagcaattgttggacctttgtcatcaagtgtacctctagctatgatagcatcttctgttacaaccggctcgaacggattactatcccatccatcaccagcaggaacaacgtcaacatgacataagatacctaatacgtcatttcctttacctgcctcaattcttcctgcaatatgatccacatcatgtgttgtaaatccatctctatgtgcaatttcatacatgtagtctaatgccttacgaggacctggaccaactggtgcgtcttctgatgcttttgcatcatctctcacactttcaattgctaataatccttttaagtcattaatgatttgatcttcgtattgttgaactttttctttccacattcgaaatcgacttccttttttctataagttaaattctattttacatgaaatgatataaaaactacaataagatgtcagaaaataataaaaaggaacaaaacgatgctatcgatatgacacaaatcataaatagctgctttgttccttttttaatttatatatttaaaatacacatattcaagagctcgagatataagtcaatgtactaggcacacaatttaatattgacagtaattaaccgaacgaaaatgagccccggagccccccaacacagagaatttcgaaaagaaattctacagacaatgcaagttggcggggccccaacatagaagctggccaatagtcagctttcaataatgtgaaagttggggtaagggccccaacacagaagctggccaatagtcagctttcaataatgtgcaagttggcggggccccaacacagaagctggccaatagtcagctttcaataatgtgcaagttggggtaagggccccaacacagagaatttcgaaaagataaagaaatacgttttctttagatattagtatttcttatgaatgagtttcacgcatgtattcttctttctatatgcatattagctatgactaacgataaagaaccactatataataaatcatagtggttctttatcatttctgtcctactcacatcttattctttatcagataatgcatttttattcttttttaaatcttcttcagtgacgatacgtaaattattatttggtgctgcgccaccttcatcatcaaatttacctttttcaatactttcgtcagtcttattgtcatattcggtaaattttgatttttcttcttcgaaaaatgcttttggattattttttaatctattagcatattctttcggatttgtttttacttctttaattgtttcattagcaattgttcctaattgcgtcgctttatccttagcattatctttatagctttgaggatcttgtttatatttattatattctgctttcagcttgtcacgactatctttacgtgtaacaagtacagctgctacagcgccacctatacctaaaatcgctttaaataaattaccttttgccatatcaatcgtctcccttttatttataatttaatttgtcaaaatcattttcagttaataaacgatattctcctgaatctaaattgctgtccaattctaaatcagcaattttgatacgtcttaaatgtaatacctcattttgaatgctatgaaacattcgtttaacttgatgatattttccttcataaattgttacgtgtgacgtttgattatcaatataagttaatattgcaggcttaaccttgccatcagacagtgttacaccctctttaaaagcttgaatgtcgtcttcagtgataggatttgctgaaataacttcatattttttagaaacatgtttgtttggactcattaattcatgattaaaatcaccatcattcgttatcaataaaagcccttctgtatctttatcaagacgaccaaccggaaaaatatttagatgttggtattcaggtattaaatcaataacggtttttgaatgatgatcttcagttgctgatatataaccttttggcttatttaacataatatagacattttcaatgtattctattaattctccacgaactgttatcttatcgttttctggttctatatgtgtttttggtgatttaattacttgttcgttgacatttacaaggccttttttaagtaactgtttgacctcattacgtgtaccgacgcccatatttgctaaaaatttatctattctcatcgtaaaaacctaactctacgtcttaatttttcaggaatttcacctaagaattcgtccgcaagacgcgttttaattgtgattgtaccgtaaattagaatacctactgtaacacctaaaataataatgattaagtaaccaagtttagtaggttctaagaatagatttgcaaggaaaaatactaattctacacctagcatcataataaatgaatacaagaatatttttgcaaaatgaatccaactatagctgaatttaaacttcgcatattttttaagaatatagaaattacatccaattgcaaataataatgcgatactagtacttaaaattgcaccaggtgtatggaataacataattaatggatagtttaacgctaacttgataactacagaagctaaaataacataaactgttaatttctgtttatctataccttgtaacattgatgccgttacacttaatagtgaaattagtattgctacaggcgcataatagaataataagcgactaccatcatggttagggtcatgacctaaaacaattggatcgtaaccatagaaaactgtgaataatggttgtgccaaggccataattccaatactagctggaacagttataaacattaatacaccaatagatgttctaatttgatgatgcatttcatgtaagcgaccttctgcaaatgtttttgtaatataaggaattaaactcactgcaaaaccagcacttaatgatgtcggaatcattacaattttattagttgacatatttagcatattaaagaatatatcttgtaactgtgaaggtataccaactaaagataaagcaccgttatgtgtaaattgatctactaagttaaataatggataattcaaacttacaataacgaacggtatactataagcaataatttctttatacatcttgccatatgacacatctatatctgtgtaatcagattcgaccatacgatcaatattatgcttacgctttctccagtaataccagagtgtgaatataccaataatcgcaccaactgctgctgcaaaagtagcaataccattggctaataaaatagagccatcaaagacatttagtactaaataacttccgattaatatgaaaatcacgcgtgcaatttgctcagttacttctgacactgctgttggccccatagatttataaccttggaatatccctctccatgtcgctaatacaggaataaagataacaaccatactaatgattcttataatccaagtaatatcatcgactgaccaaccgtttttatcatgaatgtttctagctaatgttaattcagaaatataaggtgctaagaaatacagtaccaagaaacctaaaacaccggtaatactcattacaataaaactcgatttataaaatttctgacttactttatatgccccaatagcattatatttcgcaacatatttcgaagctgctaatggtacacctgctgtcgcaactgcaattgcaatattatatggtgcataagcgtatgtgaacggcgccatattttcttgtccaccaattaaatagttgaatggaatgataaaaagtacgcccaataccttggtaattaatatactaatggtaattaaaaaggttccacgcaccatttctttactttcactcattacgaatctccctatctcatgtttattaaagttttgtaaactaaaagctgtttctctgtaaaatcatttttcattattatgaatatatcacaaaactttatttcattgtcgtatattcaatgaattatcataacaaaattatcaacacattgtcattgaatactagattttgattagaatattacgaaatttcatataaacattatactactatttgagatgaacatcgcataacagtagaaaaatcattcttatcatacacatacatcttcattttttatgaagttcacattataaatatattcaacataattgtcatctcataacacaagagatatagcaaagtttaaaaaagtactataaaatagcaattgaatgtccagtaacaaatttggaggaagcgtatatgtatcaaacaattattatcggaggcggacctagcggcttaatggcggcagtagctgcaagcgaacaaagtagcagtgtgttactcattgaaaaaaagaaaggtctaggtcgtaaactcaaaatatctggtggcggtagatgtaacgtaactaatcgattaccatatgctgaaattattaagaacattcctggaaatgggaaatttttatatagtcccttttcaatttttgataatgaatccatcatagatttttttgagtctaggggtgttaaattaaaagaagaagatcacgggcgtatgtttccagtttccaacaaagcacaagacgtggttgatacattagtgacaactatcgaacgccaacatgtaacgattaaagaagaagaagctgttagtagaatcgaagttaatacagaccaaactttcactgtacatactcaaaataatagttatgaaagccattcgctagtgattgctacaggtggtacaagtgtccctcaaactggttcaactggtgatggttataagttcgcacaagatttaggtcataccattactgagttattcccgaccgaagttccaattacatcagctgaacctttcatcaaatccaatcgtctaaaaggtttaagtttaaaagatgttgaattgtcagtacttaagaaaaatggtaaaaaacgcatcagtcatcaaatggatatgttatttactcattttggtatcagtggtccagctgcattaagatgtagtcagtttgtttataaagaacaaaaaaatcaaaagacacagcacatttctatggcaatcgatgcatttcctgaattaaaccatgaacaattaaaacaacacatcacatcattattattggacacaccagataaaatcattaaaaacagtttgcatggtctaattgaagagcgctacttactgttcatgctggaacaagcaggaatcgatgaaaataccacatcacatcacttatcaaatcaacaattgaacgacttagtaaatatgtttaaagggtttgtatttaaggtgaacgggacattacctatagataaggcatttgtcacaggtggtggtgtgtcacttaaagaaattcaacctaaaacaatgatgtctaaattagttccgggattatttttatgtggtgaagtattagatatacatggttatactggtggttataatattacaagtgcactcgtaacaggacatgtcgctggattatatgccggacattactcacatgcatcaatggaataatagtataaaatttggttcgattctctttagtagatcaactttttcattcaaataaaaatgaccttaatataactgagtcactaaaaagtgtcgttatattaaggtcatttcgttaattatgattctttttcgtttttagtacgtcttctagctaacaaagccgacctgtaatcagtgcaaattctttcaatggtaaatccattccttcagaacctgtatttggaagttctttttcaactttgcgcgattcatgtgtctcttcttttttaataggcgtacaaacttttggagctggctgaatttcttttggtgatactttcgtctcttcagctggtaatttaattgctaaaatttcatcaacaatgaattgcgtgtgttgtttgatgtcatttaatgtcgcatcttcatcaatcattctattgccatctgcaacatattgatcaattaatacttttactttagctaattgttctggtgttgcgatcgctttgaatttcgcatatgtttgttgagcaatgttatcaattcgcagtaagctattttctttttcagtaattactgcttctatatcgcttaatgcaacattaaatcgttttaaaactgcatcaacatcagcattagtgcgtgctgtttttaattcttcatccatttgtaattttaaagcagttatagcttttaatgcatcagccttattacgattacttacttttcgataattttgcactaaagcagtgacgcgtgcaagatcatcattaatcgttttttcagcatctggctttttaataggatgtacatctaaatcatgtattgtttgtagatttaatgatgctgttttatcaacttgtgcattgctacgatcttgatcaatttgtccaatagcagtgtcataaatattttgtaactgtgctaatatactatttctttcttctaccgttgcttgaatattcgcttcaattgcttgttttttatcgttgaataatgttgtcaattgttctcgagcagacgcctttctgttaataacaggttcgatttcacgaatttcgtttttctcatcatgcaataaatatgccacatcagcattagtcactgcactagcaatttgttgtttagctttaattaactctttttcaacttgtgctattgcaatattttgttcttcatctgtcgcttcgttatttgctttaattaaattaattttatttgtagcgatattttgaatttgttgtaatgctgttgctttaactgttgtcgctggtttaatttttgaaataatattttgagcatttatactatcttgattaacttgggcagtcttatctgcatgattgatctgatcaatagcctgattaagtgcttgttctactaaatgtttagcagctagtctttcttcttcagttgataaatcgctttgatcgattagtgcattttgagcttcggcttttacaccaacagattgacgcgctgctggtttaacttgaactttaggtaaaatcactttgatgttgtcgttgccatcagtctcagttcgatccacttctgcattcgttttgttttgtgcaatgtcatttttaattgtatttacaattttatttaaagtatcaatagcaacatctctttcatcttgagtagtatccaacgtatttcggattgcatcgagttgatttttattattttcttcaatgctatcaagcgcagctcgtttacgtcttactttaggttttatttgctctattgccttgattgtttgatttctaacatcagtaacagcagcatcttgatttgtattttctatttcttgttgcgcttgtttgagtgtgtcgctaattaattgattcgcttcatctaattcatcaactgttgcatgtggtgtatcttttattgattctacttgattttctgcacttgcttttattgcttgttgtgcttcaggcttaattacaatatgaggttgtacaccttttagtgtagcaatgccatttgtttcaacacgtttcacatcattattcgttactgcttgattgatgttttgtaatgcacgtttttcattattcgctaattgatttaaagcaacttgtttttcttcatcagtcgcatgttccgcttgctcaatttcgcgctttttagcttcatattgttgcttaactgcatctctagcagctgctctaacaatatggtcaggcgtcactaaagcaatgctatcaagcgcttgacttgttgtatcatcaacttgttgatttgttctattattcgtaatatctgtcatggcttgatttacaaattcattgattttatctagtgctacttgtctttcttctgctgttgcttctttatcctgattaatcttagcacgtaattcattcgctttttgattgattttttcacgtgcagctggtttaacttttgtttcaggttgaataattttaatcgctgatacaccatttgttgctgcttgattcacctgactattcgtttgagcttggtcaatagctgcaagtgctttttctttttcttttgctaatgcttgtgaagcaacttctttctcattatctgttgaatcaagactattatcaatttgctgttgcttttctttaacagctttttcaatatctgcaattgcctttggtttaattactacttcagcttcaacattatctatagcttttagcgcttgatttgtagttgtgtctacctgatcatttgtttggttttgattaatttgattaaatgcttgatctttaagttgattgatttgattaacagcagcctgcttttcttcatcagttgcattaggtgtttgtttaaccgcttcaatacgcttcgccacttcagcagtgattttatctcgcgctgcttgttttttactacgtcaacttgaacagcatcgatattattctctgctactgtcgcagcttggtctacttctgcatttgtgttagcttgtttaatactttcaatagcttgttgtctgtctagatttaaagtattgatcgcagcatttttctcatcattcgttgcatctggtgtagcattgatttcagctaatttagcattataatgctgattgatttgtgctaatgctgcaggttttttaacaatatttggctgaatcgcattaattgcttttgtacctaattgttgcgcttgatctacttccgcatttgtatcagcttgatttatattattaattgccgttgctaactcttgatccacttgatttaaagccacttgcttttcttcagttgttgcatttgtgttttgattaatttcttgctttttagcagttgctaaatcatttaatacacctgtagcagtttgtttcttcgttacatgcggttgaactgcgccgatttgattgactgcatcgtctctaatactattgaccatcgcagtagtagacgtcacaccaatatcagttaatgctctatttttaagtgtattgacacgatttatcgcttcttgtttctcttctcgagtcgcgccaggtgtagcattgatatttgttatcgcctctcgcgctttatcatttacaacattgcgagcatccgttttaacttgtgttgccggttgaatcacaactatattttgtgtgccctgatcttttgcttgtgcaacttcttgattcgtatctgctgcattaatattttgcttcgctgtggctacagcttgatcaagtaattgttgtgctgcttgttgttcttcgagcgtcgcatcattattattaaatatcgtattatgttgcgtttccgcacttttatcgatggcattttttgcatctgtttttacttttgtagctggtgtaattgcttgtattccttgaatcgcatttgtctttacttgttcaacatcagcattggtattagcgtttaaaatgtttgtgtttgctgcagttacagcagcattcactttgtcaattgctgcttgtctttcttcttgagtcgcatcaggattagcattgatttctgcgatatgttgttgtgcatcatgtgatacagcatcccttgcagcttgcttaacaacagttacaggagcaattggattaatggcatttagaccatctcctttggcgttatcaacatcagcatttgttgttgcttgattgatttgttctaaagcatggttggttgcttgagttaattcgttcaatgctgcatttttctcttcctgagttgcttctctattactatttatttgttgtcttttcgttgctgttgcttggttaattgcatctcttgcagcttgtttatgtgtcacttgaggaacaactgctccaatagtattgatgccattatttttagctatttcaacgtcagcatttgtagtagcattcgtaacattatcaatagcatctgtttcatccgtagctaattgatttagtgcatcttgaatctcgtcttcagtagcatctggtgttgcattgataatttccctttgtttcgttgctttatcacgtattgcttttttagcatttggtttaacaaccggtgttgcagtatccccacttaaggtctgtataccttgatctttgattctagtaacgccatcatcagtcgtttggtcaccaatattaccaattatttcatttttatgttcctcgataacttgtattgctgcttgtttttcttcatctgtcaattcatcattttgattaactaaatcttccatttggtcaacttttttattaactgcattttcagcatcaacacttcgaattaacgtatgttgcatttgattagttaatgaatcaatatctgcttgagaaactcttttatttaatggtacattgttacgattttcatctaaaatcgtttgtgcacgtcttttaagatcattaaagatatctaatgatgcaaatgtataatcagcttgttgaatgcgtctatcaacctcggcttgtaatgcatctttattcatgatgatatcgattgtatatggatttgtccttacagtatgactttcagcaggtgaattaataaaatcttgtgtatatgttttatatgttaatgtatcattaaatgttactgttcttggtgtcggtacattattaacacgcaacttatactttaaatccaatattttatcaggcattaatcgtgccggcgagttacctgaacctccaccagtacttttaattgttatcactcgattcgccgcatcatacgtcacattaaaatcattcatatcaacacctgaattactgcttggaaaatctttagtcaatgagttattaacatattctaccccttcaggtaattgaacttgatatacaaaatcatctgtattaaatgaagcaccgaagttaccattattctttaatgaagttgtgactgtaaattctttattattagtagctgtaggttccattgttcgtctttcaacataaacatgcgaaccagaatgtagaccaattgagtcaacaaagtcatagtatttataaccgtctcttagttgataaatgccacgcgcatctgttattgcatcatttttaggtacaaattgaatttttaagtgactaacattttcaggcactttaaacaaacgccaaatcggaccataagctactgatttttctgcaataacagtatcattatcagcatttttaattattaaatttgtcacaccttgatagttttttgtagtcatcgtattaaattcgaaaattaattcagaatttggatttactgttaatgttttctcaattccattaaaatcaccatgatcatttgtatcatttcccttaatacgacctaatgcaattacatttccttgtgcttgatagttcttagcatcagctgaatcaaacatacttgttctaaccatcgcatgactaaacacacctactttaccaccattgataagtgtaaagcctggtaaattatcaacaactgttactgatggtacagaacggttggtacttggtctaataccattgtcatcaaatgacagcacttcgttaggtgcattttgtcctgcattattggcattaggatcagttgtaggcgtgtatggcgctgtaattgcaactggtgcaccaccgtttcctgccgctgcagccgctggatctgctggagttgcattaggatctgccggtgccgcacgtttacttctctttttcggtctattagatgctggttcagcaattgcaactagctctggtttatctgaagaatgacgaacatcttcttgaatttcctttaaagttagatgtcctcctgaaccattttcatttgttttatttggtacatttaatgtggtattattcgacactgcatcattattattagcgtttgacactgtctcagttgctgttgtattgccatctgtatgattattgttttgtgctgaaggcgtacttgattgcactgatgttggcgtagcttgatttactatactaccattattatgattaaccaatgcttgattcgttgcttgattggttgttgcagattgattaggtgtattctgcgcactatttgctaaacctctattattagcaacatctttatcttgtgaatttacaggtgttgcttgattagtatcgctttgtacattattatccgtagttaaggcttgtgcaccatttgggtttgaaagtaataaaactgttccgattaaagtagagaatatgcctactttatacttcctaatactatatttatttttctttaacaaattcatttcattttcctcctggttgtctgttctctgctgtgttgttaagaattatgctaaaaatatacgctccctcacattatgtttatagctatattattttgtacaatattttaagttcactcaattttatcatcatcattttataaaataaagttttattttattacaatttagtttccgttttgtaattaaaatcttaataaaacataacaagaacgctttagattgttttgtaacagaaagtaattcataccaaaaaacaccaagcaaccgaaacgttacttggtgtcattacaaatgtaatattattttaaattatgtcactactttaaatactttttatttccaaaccttcatcgccccatgcgtgcatgccgccttcgacatttacggcatcaatgccatttgcctctaaatattctacaactttagcgcttcgaactccaccagcacatacaatataatatatttcatttttattaaatgaatttaaattatccggaatggtatccattggaatcaactttgcattaggaatatatcccattgctgtttcttcgtcagtacgaacatcaacaatttgaactggtttagattctaaaagtttgttttttaattcatctgtagtaattgacttcatttcaaagtcctccttaaaacattatttagctacaatattgactaatttttgaggaacagcgatgactttcatgatgtctttaccttcaatactcgctttaacattgtcattagataaggcaatttcttgcatttcttcttttgatgtatctttagcaattttaattttagctctcaatttaccatttacttgaacaacgatttctatttcatcatctacaagtagtgcttcgtcataagttggccaaggttggtacgtaatagactcttcatgtcctaattttgaccataattcttcaccgatatgtggtgcaataggtgctaacattttaacgaagccttcaatgtaaggtttataaacttcatcaactttataacactcattaataaataccattaattgactaatagcagtattaaatcctaatgtttcaaagtcttctgttacctttttaacagtttggttataaactttatctaaagatttattatttgtagttacaatttttgaactcaatgttccatcttcatttaccattaaacgccatacgcgatctaagaatcgacgagacccatctaatcctttttcactccatgcaattgcagcatctaaaggtcccataaacatttcgtaaagacgtaaagtatctgcaccatgagactgtactatatcatcaggattgattacatttcctttagatttactcatcttctcattaccttctcctaaaatcataccttggttaaataatttttggaaaggttctttagtaggtacgatacccaaatcataaaggactttatgccaaaatcttgcatataataagtgaagaaccgcatgttctactccaccgatatataaatcaacaggtaaccaatgttttaatttttcaggatctgctaacatattttcatttttaggatcgatgtaacgtaaataataccaacaactacctgcccattgtggcattgtatttgtttcacgacgtcctttcatacctgttttttcatctacaacatttacaaatgaatcaatattagctagtggagactcaccagtccctgatggcttgatttcatctgtttcaggtaacaacaatggtagctcttcttcaggaacagttgtcattgttccatcttcccaatgaatgacaggaattggttcgccccaataacgctgacgactgaataaccaatctcttaatttgtaattaactttcttttcgccagcacctttttgctctaataattgaatagctttagtaattgccgcttcattttctaaaccatcaagttcaccagaattaatatgtttaccttcaccagtgtatgctgcttcttcaacatttccaccttcgatgacttcaatgattggcaaatcaaactttttagcaaattcataatctctgtcatcatgcgctggtactgccataattgctccagtaccatatgttgataatacataatcagcaatccaaatttgtactttttcaccagataaaggattaattgcatatgcaccagtaaacacacctgatttatcttttgctaaatctgtacgttctaaatctgactttttagaagcttctgtttgataagcttttactttttctttatattcatcagttgtaattgaattaactaatgcatgttcaggacttaagactaagaatgatgcaccatagattgtatctggtctagtcgtaaatacttctacttttccttccgcttccgtattatctacatcaaatgaaactttggccccttcagaacgtccaatccaattgcgctgcatatcttttaaagattcaggccaatctaaatcatctaaatctgctaataattgatctgcatattctgtgattttaagtacccattgtttcatcggcttacgataaactggatgtccaccacgttcagagacaccatcaatcacttcttcgttagataaaacagtgcctaatgctggacaccagttaactgcaacttcatcaacgtatgctaaacctttgttatataactgtatgaaaatccactgtgtccatttatagtattctggatctgttgtattaacttcacgatcccaatcataactgaaccctaattctttaatttgtcgtttaaaagtttggatatttttctttgtaaattcacgtgggtcgttgccagtgtctaaagcatattgctctgctggtaatccgaatgcatcccaccccatcggatgtaatacattatatccttgcattcttttatatcttgaaatgatatctgttgctgtatagccctcaggatgtccaacatgtaaaccagcacctgatggatatggaaacatgtctaaagcataaaatttcttttgacctaagttatcatttgttttaaatgttttattttcgtcccaatagtcttgccatttcttttcaatttgattgtggttgtaattcaacacatttcctcctattcaataaaaaagacacctctaactattctatttacatagggacgacatttgccgcgttaccaccctatttcacaaaaattgtgcactcattttaatagtaagagatgtcattcattcaatttaaaattaatacgatttacatttagtccttaacactagctctcagcatcactagctttctgtagaaaagctccaaacgaaattaaattatacaaattaatattatgttataacgacatttatttcaagtctataacgttaattctatttactcattatgcatctatttttttaggttgcgtattattctccttgaaaaccattaataatattaatgcaaatacaagtagtagcatcataccgataaacatcatgcgcatattaaacgcatcaactaatacaccaccaagaaatggaccaaatgcttttcctactgtagcagctgaattcacaaaaccttggtactgtccttgcttaccatctggcgctaactgattggctatagttggaactgctggccatacaaacatttctccaaaagttaaaataatcataccgacaacaaatattgtaaagttttcggcaaaactcgtgacaaagaacgacaacataaaaatgatgatgccaacaaacatttgcttctttaagtttccttttaacagatagagaatcggtttaattaatggttgtgctactaaaatcattattccgttaattgtccataaaacactatattgtgccattgaaatattaatagattgtgtaaatgatgcgattgtagactcccattgaatatacgcaacccaacaaattgcaaacattgcacaaattagtactaatgaaataaatcttgctttattctttttaccagtaatatctaaatgagttggatatttaactttcgcattaatttcaatattaaattgcgttaccgcgacaagcgcaaacacaacatacataataagattggctaaaaagatatagttaaagctaaattctgcgacaaagccgcccattgcagcaccgacagccacaccaatattttgcgctaagtatatcgcattaaacgtttgtcttccgccatttggccacactgctccagccatagcgtatatcgcaggaataatcattccgccaccaaagcctaacattacaagccatacagcataccaaggccacccgtgaaagaaattaagtagcgttgtactacaaagacaagtgaaagttccaattaaaatcgtcttgtatccacctaatttatcaaatagtgaaccacctaataagtttccaataaccatgccaaatgaatttatcattagcactaaaccagcaacagttaaactttttccaagttcttgtttcatataaattgtatttaaaggccacaaaaaactggaaccagtaatatttaacgccatgccaattactagccaccagactgatttaggtatattcatatttcatagttcctctctcttttttgtcaaactataataaacactataacattaaaatatgttaaaatctgtacttagaactctttttttatagaaaggaaaatgacatatgggcaatcatttccaatacgcttttgaaaacaaacgttatcacacatggaattaccatttaaaaaataaatttggacaaaaaatatttaaagttgcattggatggcgggtttgactgtcctaaccgcgatggcactgtagcacatggtggatgtacattttgttctgctgcaggtagcggagactttgcaggtaatcgtgcagattcaatcgcagtacaatttaaagaaattaaggaaaagatgcatgagaaatggcacgaaggaaaatatattgcttattttcaggcatttacaaatacacatgcaccagttgaagtattaaaagaaaaattcgaacctgtacttaaagaaccgggtgttgtgggattatctattggtacgcgtcctgactgtctaccagacgatgttgtcgaatatttagcagatttgaatcaacgaacatacttatgggttgaattaggactacaaacaatccatcaatcaacatctgatttaatcaatcgtgcccatgatatgaaaacttattatgatggtgtggcaaaattacgtaagcataatatcaatgtatgtacacacatcattaatggcttacctggcgaagactatgacatgatgatggctactgccaaagaagttgcacaaatggatgtacaaggtattaaaattcatttacttcatttgttaaaaggtacaccgatggtaaaacaatacgataaaggtttattaacttttatgactcaagaagaatacacaaacctagttgtggatcaattagaagtgattccccctgaaataatcgttcaccgaattaccggtgatggtccaatagatatcatggtcggtccaatgtggagtgttaataaatgggaagtattaaatggcatcgatgctgaattagcacgtagaaattcttatcaaggcttgcgttacaagtctaaggtgaagcaatgaaattagaacgtatactccctttttcaaaaacacttattaaacaacatataacaccagaaagtattgttgtagacgcaacttgcggtaacggcaatgacactttatttttagccgaacaagtaccagaaggacatgtttatggtttcgacattcaagatttagctttggaaaatacacgtgataaagttaaggatttcaatcatgtttctttaataaaagatggacatgaaaatattgaacatcatataaatgatgcacataaaggtcatattgatgcagccatctttaacctaggttatttgcctaaaggtgataaatctatcgtgacaaagcctgacacgacaatccaagctattaattcattgctatcattaatgtcaattgaaggtattattgtacttgttatatatcatggtcatagcgaaggacaaattgagaagcatgcattgcttgattacttgagtactttagatcaaaagcatgcgcaagttttgcaatatcaatttttaaaccaacgtaatcatgctccattcatttgtgccatagaaaaaatttcttaagcatttgctgcgctatactatttataatttaggattgagtagtcaacatttgaaaaattaataccaacaacaaaaagaggttttcaacttaatgaaaacctctttttatgctattaaacttacacagcaataattgcgtttaaactattttgcattgctgttgctctacttgcaatcgcatcactgatgaaattcaacaactctactttctcttgttgtaacttttcattgaaatgaataataactgttctttcatcgtcaacaggacgctctttgtaaatccattctaattcaactaaattattatacgttctcgtacgcttatacggtttaacttcaacaaatctgtccatttctttaagcgtcatagaacctttttgccataaagttagtaaaattaaaatttcttctctagacattttgtattcgctttcaatctcgctgaaaattgagttaatgtcacccaaaagtgtttctaattgcaaaatcccaaatacagtgtcgttatttacttttttcatgctaaacatctcccaattaataatcacatatttagctaccatacaagtattaacaaacatcccaacaatcccaaaacttgtatgtgctaacttatgcataaaactacaagtgtaaataaacttgctttctattcaattgtcaaagttgaataaaattaaataagtataaaaaccaataatcaatagagttaatatttagaaataagataatagtacataaaacaaatcactctattacatattaattttataatttatatacaaagaaaatatatcaatattaccattaaattgcaacaattctacatatatttcttcaaaaaagatacgcattgaatttttattacatataactctcatgaaaattgattaaactaaattaattagttagccttaaatttaacaaattaaatcaaaccgaatgaggctaaattggttatttttcaagatatgatttgtataaatcaaaacatttcttacaaatcaaatgtgtataaaatgtgatatacattctcaaccttaaaaaagttctaaaaaaaagatgagcatctactgtctcatctttcagttcttttttacgggcctgttttctaatttgagcacaatcttcgatttctttatctaaatgactaccaattaaatctatttcttctattgttaaatcgctatctccatcttcttttatctctggtattattttttcttcaactaagtcacgatatagtgtttttgaattctcgttcaatttcgattcgtgattttgaatactttcttccgcaccaatgtatatctattggcactagcttctacttttgtaccatcaataaaaattgaattatcatcaataagattttgctttaaacattgactatagaactgaataaataaagattcaattaacgcatcagtattaggattcactctaaaacgattaatagttttataagaaagtgtttgatcttgggctaaccacatcattcgaatactgtcatgaagtaatttctctattctacgaccagaaaatacagattgagtatatgcatataagatgatttttaacatcatttttggatgataggatgttgcaccacgatgatgtctgaattcatcgaattcgctatcaggtatcgtttcaacaatttcattaacatatcgcgaaatatcattttgaggaattctaacgaagtttctattggtagtgtaagttggggtcatgttataatttttatacataaggcacctctttaatttagtttagtagtatttattaaattatacgaagggacccaacacagaaaattcattttattgaattttacatttatgtgcaagttgggaaaaatgtcttattttttcaaagtatttaaaagtaaaattacatgttaatacgtagtattaatggcgagactcctgagggagcagtgccagtcgaagaccgaggctgagacggcaccctaggaaagcgaagccattcaatacgaagtattgtataaatagagaacagcagtaagatattttctaattgaaaattatcttactgctgttttttagggatttatgtcccaacctttttagaatattaaatttctacaatttcgtcatcttcaacaataaagcccattgtattgacgctgttatttaagaaagtcagaatataacgcattacttcatcacgttctggctcattgtgaacctcgtggtaaaaaccttgccaagctttaaaatataattcaggtgtttgatatttttctttaaactcatcaattgccctagtatcaacaattaaatccttcgttccatacattaatagcgttggcattggttgaatgtcatgaatatgagccatcgtatctttcatcgtctcattaattgtattataccaatgatacgttgctttttttaacattaaaccatcgttaactgtttcttcaacaatttctaaattacgtgttaaatcttttggttctacaccaacattaaaacgtgtgtcttttgaaattttacctatatttgaaacaagtttatctttacgattttttccattcttttgaagttctagcataggagaaattaacatcatcccctcgattggcaattctactttttcaagtaaatttaataaaatcaaaccgccaagtcctacccctaatacataagtaggaattttatattcattagctatctttaaccagtctagcaaactttcgtgatacgtttgaaagttttcaatttgtcctttattagctcttgaagtttgaccttgaccaggcaaatctcccataatcacatgatagccatttcttcttaacatcgtaataacatatgcatatcttcccgtatgttctaatatattatgagcaataacaacgacgcctttcgcatcattttcagcttcccacttccacattattatactgcccctttttcattaatcttcaataacataattatagcaaattcactatgtagatttctatttatagtattattgttgtccatattattatatataaatgaaatcaacatcaataatagtgtaattatacataattatttttgattgtttttgatgaaaacgctttctcgaatatttttttcatgctaaacttattgtaaacacaagggtttggaggagtagcaatggcactattaaagaatttttttatcggattatctaataatagttttttaaacaacgcagcaaaaaaagtgggcccacgtttgggcgccaataaagtcgttgccggaaatacaattccagagttaattaatacaatcgaatacttaaatgacaagaatatcgctgttacggtagacaatttaggggaatttgtcggtacagttgaagaaagtaatcatgctaaagaacaaattttaacaattatggacgcgcttcatcaacatggcgtaaaggcacatatgtctgttaaattgagtcagttaggtgcagaattcgacttagaattagcttaccaaaatttaagagagattttacttaaagcaaatacttacaacaatatgcatataaatattgatactgaaaaatatgctagcctgcaacaaattgttcaagttttagatcgcttaaaaggcgaatttagaaatgttggtactgtaattcaagcatatttatacgatagccacgaattagttgataagtaccaagatttacgattacgtttggttaaaggtgcatataaagaaaacgaatcaattgcatttcaatctaaggaagacgtagatgcaaattacatcaaaataattgaacaacgtttgttaaacgcacgcaatttcacttcaattgcaacacatgaccatcgcatcattaatcatgtaaaacaatttatgaaagaaaatcacattgaaaaagatcgtatggaattccaaatgctctatggttttagatcagagttagcagaagaaatcgcaaatgaaggctataatttcactatttatgtaccttatggcgatgattggtttgcgtattttatgagaagattagcagaacgcccacaaaacctatctcttgctgtaaaagaatttgtgaaacctgctggcttaaaacgtgttggcataattgcagctttaggagctacagttatgttaggtttaagtacaattaaaaaattatgccgtaaatagagcaagacataaacaataatttaggagtctggaacaataatcaatgttctaggctcctaaatgttatattggcagttctgaaacatttataaatctttgattatgaactcacaacagtgctctatgcttttatagattttaataaattagccatttcaattgcacttactgctgcttcagcacctttattgccagctttcgtacctgctctttccacagcttgttcaatactttcagtcgttaaaataccaaatatgactggtacattagtttgatcattcactttagaaacacctttcgcgacttcattacaaacataatcataatgagacgtagcaccgcgaattacgcatcctaatgtaattactgcatcataatttcctgatgaggctaattttttagctactaaaggaatttcaaacgcacctggcacaaatgctacatcaatattgtcttcattaacatcatgtcgaatcaaagtatcttttgcaccttcaagtaatcttccagtgataaaatcattaaatcgactaactacgattgcaactttcaaatcttttccaattaatttaccttcaaaattcatgttaaagtcctcctatattaaatgacccatttttatttttttcgtttccatataatcatgattatgtaccgtttctggtacgataacttcaattctttctgcaatatcaatgccatattgttttaatccctcaaatttacttggattattacttaataaattgatatgttcgatgttaaaatattttaaaatctgtgcagcaatatgataatctcgtaaatcttcatcaaaacctaatgctaaatttgcagttactgtatcatatccttgctcaattaattcatatgcgcgtaatttgtttaacaatcctatgccacgaccttcttgaggtagataaataatcatgccaccatgttcattgatatacttcatagacgattcaagttgagcaccacaatcacaacgttgactatggaaaatatcgcctgtaaggcacgcagaatgtaagcgtacattttcatgttgtcgaattgcaccttttgtcagtacaactatctcttcatctgtgtatgtcgctttaaaaccatacatatcaaatgttccgaaatctgtaggcattttcacttttgccttaaattcaatttctggttctaattttttacgatattcaattaaatcatcaatcgtaatcatctttaattgatgtttttctttaaacttttgtaaatcttgtcctttcgccatcgtgccgtcatcattcataatctcacaaatgacaccagcgggcttggcaccagtaagtttagctaaatcaacagccgcttctgtgtgtccatttctagctaatacgcctttatcttgtgctactaatggaaataaatgaccaggacgattaaaatctttagcttcactactaggatcaatgagctttttggcagtcaatgtacgttcataagcactaattcctgttgttgtatctacatgatcaatactcactgtaaattgcgtaccaaagatgtcggagttatcatcaaccatttgtaccaaatccaaacgttgtgcaatatctttagacactggtgcgcatattaatccccttgcttctttcgccataaaattaatggtattatcgttcatccattcagtaaccgctactaaatcaccttcattttcacgattctcatcatctactacaataattggttctccattttttaaagccattaaagcactgtcaatattatcgaattgcatgctacccctcctaaaaaccaaatgctcttaatttatctacagataattggtctttatctttatttaaaatattttcaacatatttaaacaaaacgtctgtttctaaatgtactttatctcctaattttttggatgataaaatcgttgaacgcctcgtttctggaataagatgaatgtcaaaactgttatcatgcttatcaaataccgttagactaacaccatccacagtaatagacccttgcttaactaactgattattaatatgttggctacattgaatcgtaataatttttgcattggctgtttcatttatttttgaaactgttcctagttcatctacatgaccgaggacaaaatgtccaccaaacctaccgttaccactcatggcacgctctaaatttacttctgattgtcgcttaacatctgctaaataggttttattttcagtgcctttaattacttgaacagtaaaagatgtctgattaaaatcaatcactgttaaacatgcaccattaacactgatggaatcaccaatatgcatatctgccgtaatcttatgtgcttcaatttcaatcgtcctgactgattgacgaatttgaacacttttaacgacacctatttcttcaacgatgccagtaaacatgcatcatcacttctttcgtaaagttaatttaacattttgatttaataactcggaatgaacaatttcaaattggttcgcatctggtatctcaatcacatcatttgtttgataaaattgataatttccagatccgccaattaatttcggggcataatagagaataaattcatctatataattagattggagaaattctgaagtagtggttggacctgcctcgactagcaaagttccaactcctcttttatataaattgtgaagaattgttgttaaatcacaagacttcaagtaaataatttcaatatgtgtttgattgcttgttaaatttggattttcagtatatatccaaattggtgttgattcatcttgataaatttgctgattaaaatgaatattcccagacttagacaatattacttttatagggttttttccatcttgaatacgtgtagtatattgtggatcatctaattcaactgtacgtcttccagttaacactgcgtcgtgtcgatgtcttaacttatagacatcttgtttaacctctttgttagtaatccattgactttgtccattatcattcgcttgtttaccatctaaacttgcagatactttcactgtaatttgtggcagttgctttgcttttgctttaaaaaagtcttggtataattgtgatgcccgttcatcatcaacgcattcaacctcaataccgtgagcccgtaacgtctcatcaccatgtgtgtctaacgaattgtcttttgttgcgtatactacttttgctatcttacaatcaataattttgttaacacagggtggtgttgaaccaaaatgactacatggctctaacgtaatataaatcgtcgcaccttcagcattttgttgtgccatatcaagtgcttgaacctccgcatgcttgtcaccttttctcaagtgtgcaccaataccaacaatcctaccttcattaactacaacagcgccaacgggtggattaacacctgtttgaccttgtaccatatttgcaagttgaatcgcataatccataaattgactcaaatgatcacctctataaacaaaaatcctcacatcatgaattaagatgcaaggagaaaaatttatcgttaaataagcctatttgtacacatttttacaaatacgctacattatctttgtcgataattaacattctttctcccatccagactttaactgtcggctctagaatctcactagatcagccactaatatgaaacatattagcaggtcgcaggctttatttactgccggttgggaatttcaccctgccccgaaagaattatatatgaaattgttatagattatttgagtacgtagtatgtcaactacatttaaaatgatactatatgttttctgaaaaaacaattaatgacggttttaatttaatataatctgagtactataggcatctcattgatatgattcttactaacagacattaaaatcaaaccttcaattcgtctctatagagcgttctctttattatcttctagttacaaattattgattgtaactgcgctgttgttgctcattcgattctaaagcatcatataattgagatactgtatgcgcaacttgttctactatcattttcacaccatttcgtagtttattaacaccatttgtcatttgacctatcgcaatcatatttgttaatgttccaaaccttggactaataacttgattggtttccggtatgatttgtatgcctcccattggatgtgcttgtacaatttgtctattttcaagatttttaattaattgatcatcttgatccaattcatttaaatgactttttgcacctgtcgcgttaatgacaacattatacatgtctactgattcttggtttttgtatgaaaaataatacaacttgccatcatgtttcacatcttctaaatcttttttcaaaattaaagacttattttctattaattcaataattagttcagcagttcttggaggcattggatttgaatttaattgaatcatctttgagtatttttgattaaattgatgttgatcttcaatacttaagctattccatatccaatttaaattctctttcaaatgttcaatcatactttggaaaatgcccatttctgttggacgcgctaaatcatacttcaaatctgcaatatgatttcctgtacgtctatgtactaattttttaaaatcaatgtcatattcagcacattcttttaaaaataaagaaactatagtatcaagcggtgcattgccgaaatgatgttttttaatgtcatttaatttgtctttagttaagtacttgaatgtcacgtctatcattgtacctcttacacttggtaaatgagcagaacgactcgtcatagtaattggtaatttcggatgatgagcagcaacataacggacaacatctaaactggcaaggcctgtaccaataatcgcaatatcgtccagttcatttacttcgtctaacgtattatatgttggataaggcgtagcgatatatccttttttaccctttaagttatatggatcatggtaggcaaatgtaccacatgttaaaaatacataatcgtacgcttgccatgattgttctgaatttgtagtacatatgtaataagttaaattcgtttcatcgatattagaatttgtataaatctcttgaactttattataattagttgatatatttggatattttttcgtgaacatagataaataagatttcatataatgtccgaatacaaatctcggtaaatatgcaggttcatcaaaattaaaatcagtttgttgtttataccacttccaaaattcagtctcatcatctaaatttaaactcatctttttcgaaggcatattaattagcagctcagaactatcattttgaaatggtacgccctgtcccatatttactttatcatcgtataaatctatatctaattgattaaacttcgggtgcttaactaactctctcaatacacttacaccagcagttcccatgcctattattgctacacgcatatatcatccatccttttgtaattcaaaatattatatttaaactattacctataattatagcaatttggtatttccaataaaatttattaaggtaagctattatttcactttcacaaccattaaaccatttaaaacttttcatttaatatcaaccttagtgtttgtgttaaaatatttttaacgaggtgaattaaattgaaatttatagcaaagatattaatctcattagtaattctatttatgatttttagtcgtaaaaacaaagcttcttaatcaatacccttgattacaaaataaattcaactaaggtgattggccatacactcaagatatggctaatcacctttttcaatgcaaaacaaagagtatattttgcaaaatcaatatctataatttatctttaatacccttttaatactaaaaccaaattcaaattacatagtcatatcgtgtaatataccaaaggaacatagacattcatctatatagatgataatctatttaacgtctaggaggtatgttatgacgtataaagaactagcaacatttttaaaagttttatcagattcaagcagattagaaatactagatttactttcttgtggagagttatgcgcttgtgatttgttagcacattttcaattctctcaacccacacttagctatcatttgaaagcattagtaaaaaccaacttagttacgacacgaaaaatcggaaataaacatttataccagcttaatcataatatttttgagtccgtaattaataacttgtctaaggttcatacctctaaccaacgatgtttttgtcataaccttaagactggtgaatgctaatgatgacaactttagcgacactcatttttctagtaactttattatttgtattatggcaacctaaaggcctagatattggcattaccgcattaactggtgcctttattgctgttattactggtgttgtaagtttttccgatgttttcgaagtaacaggtattgtttggaatgctactttgacttttgtctcagtcattcttatttcattaatattagataaagttggattattcgaatggtcagctattcacatgcttcatgcttcaaaaggaaatggtttaaaaatgttcgtttatatcatattattgggtgccattgttgctgcatttttcgcaaatgatggcgcagcgttaatcttaacgcctattgtattagcgatggttaaaaatataggttttagtaagcgggccatattcccttttattattgcgagtggttttatagctgacacaacttctttacctttgatcgtgagcaatctagtgaatattatatctgctgattattttcatgtaggattcgttcgatattttagtagaatgattatacctaatttattctcgcttttagcaagtattatagtattgtggttatattttagaaaggcgatacctaaaacgtttgatgataataatataaagcatcctaaagatgccattaatgatttaaagctatttaaaatttcatggattgttctagttatattacttttcggctatctaatcagtgaatttactaaaattccggtatcaattttcactggaatcattgcttttatttttctaatgttggctcgtaaatcaaatgctgtaaatattaagcaagtcattaagggcgcaccttggaatatagtattattttcaattggtatgtatatcgtcgtattcggcttaagaaatgctggcattactttaatattggctaaaatattagaatatatttccaattacggtctatttagcaccattttgggaatgggcttcatttcagcgtttttatcatcaataatgaataatatgcctacagttttaatagatgcgattgctattggtcaatcaaatgtccatggcatgttaaaagaaggcctaatttatgcgaatgttatcggttcagatttaggtccaaaaattacaccgataggctctttagctacattactgtggttacacgtcttaacacaaaaagatgttaagatttcttggggcacatactttaaaactggtatcatcattacaattccagtactatttataaccctcatagggttgtatctaacacttatcatattttaagaaataaaaagacgctttctatttattgcgatagaaagcgtctttttatacttgagcaagttatatcataacttaactctatcaaattacttattcaaatgtttactgtcatctttatacacaaagtatttgaagtattttccttcagtcttcatattcttataaaagtcagcgataattgttgcattactttctgcccacttaatatcagtagcatattgatgttctcctggattttttggattccatctcatactatacaatgtattttgatctgtgcttgataagaagtgcttatgaatgaaatcagcaccgcctgaaatagctttttcaggtgtatcccaaccatgctttttagcatattctgcacctgttttaattgggtctttatcaagggctcctactccatagaaattgtagtattttttgccatcaatttcgactccattagctaattcacttttaactgcgccagtttctaataatgcatgtgaaattaaataaacttcgttaacgtgcttatctttagcagcttttaagaaatcatccgtatgtttcaataacgttggtctatctactaacatacgtttaattctatttttatcaatcccttgatactttgataaatctaaaaattgatatttttgcttttcattatcgataaaagtaccgctatccattgcacttttaatttcagttgcagatgcatctctccatgcatcattctttttatttgatacctgttgactcgtataattatttatttgtttctttgctgcatcgtttaatgtaacatttaacttttcaatcttaatgtcggatttaacatgtttgaaaaatatctgatcggatatcattgagaaaaataaaaatgagacaacagcaaatatgacaacaagtcctattattccaaaaatagaacctttcttgtgtttattcatatccacacctcttaggtcattgttgttatacattcagtttgactacgataataaagtttaacattattaaaaccgtttaacaattttatctatgcattgttacatattcataaataaacagtaatgtaaatgaaacgttttaaaccatttatcaacattactttacgttgatctacgaatcataaatgttttatctttttgtataacctttgaaaacctttatatcaataatcttattattcacgtattaaaaaacaaaaaattcttttgttcgtttacttagtttcttttttataatccatcataataaaacttgctgcatttgatctatttttataatagtactgatttaaatcaatcgtgccttcaatttgaccatcacgatacatcatttcattagtgaagttatttatcatcacgaaatcagcgcgatctcttataacatctaaatcgtcgtttcgtgcaaaaaaatgttctaaatttaaatgtgcgtaatccattgttacctcccgattacaaattttgttctatctactatttagcaaagtaataatacatcatatcacattaaattaattacttatgtcttatatttaacacttaatttagcgattacgcaaatgaatgatttttctaaatattttattctaactttatccggaaatatttgttatacgtataacttggagaatgactacttgaaatttaatgacgtatacaacaaacaccacaaaatcatacaccatcttttaaaaaaatataatattagctataattatgatgagtattatcaactactcttgataaaaatgtggcaattgagtcagatatataaaccctcaagcaagcaatctttatcctcttttttattcactcgattaaatttttaccttatcgatttattcagacaacaaaatcaattaaaagatgtcattttatgtgagaataattcaccaacattaactgaacaaccaacatactttaatgaacatgaccttcgtttacaagatatcttcaagcttttaaatcaaagagaaagactatggctcaaactataccttgaaggatacaagcaatttgaaattgctgaaatcatgtcattatcgctttcaacgattaaattaattaagatgtccgttaagcgtaaatgccaacataattttaattagtttattgtgaaatttcggtcgatgtgttaatgatgttgaaacaccctaacatcttcatataaatttattttaaccattaaattaacaacttattatacgaggagtactatatttgcaagacaattctactaaatatctactttatatccaaactgctacttcaaaccatctcgaaacaaattgtgtctttttacattgcgattacattcttaaagttccaattaacaaactcgtttcatattatgcgaaattgcatttatcatcacaaagtgtgctaattgagactgcaaaaaacatactaaatattaataaactggttcctatttacatcaacccaaaaactatactttttccgttaaaacataaacgtgcaccgatacaaatttatatcaatgcacattatattgttggtatgactgccatagagaattcaacattaatacattttcaagaaggcattcagctagaagttgatgagccattttctctagtttcaaaaaaatgtcatgaaagtttagctttgaagcacttcattgaaaatactatttcgaattaaatttaatttctaaaagtttcttagtaaagtatgatgtcacaatttttataaaatatatgctaacaatcattaataaaatcgctccaataattgttaaaataacaacagttgttgataaatctaccttaggactaacgaaaaattgtacgccagatagacttgtaattagcccaaataaaaacaagcctaataaagcaacataagcaaacatcatcactactaatgtaacaaacatactataactttttgtttctttatttcgaaatacattttgtcttaagtaagcattagcaaaggtaacaggcttatttaagttaacgctgtcatcatcagatatagaagacaatcgttgatctaatgcttgtttctcattcttgttcaaaaaccataattgctttttaacttttttatcaaatgatgctttattcataattaaggatttctctcctttataatattgacgtaattttaaacattagcgtcaattgaaagtgtattttatatattttacagaaatatatgtatcaaatctacaaaaatccatattacaatttcatttatggtgatttgacgctaaaatacagtctgctaattttccaaactaatgctttttaggtaggtacaatgataaattttaatcgtatatatgtttcatatataatgaatctatccttaaacatattgcattcaaaataattttaaaaaatgaaaagaaaggatttagcatgcaaaaattcaaagactttttttacgatgatttatcggttacacgaggaaattattttttaactttaatggcagcattttttattactatcattttatttatcggcatagttgtcagtgaagtacatttactttatagcatgctaattgtattagtaggtttaattctattgaggctattcaaaatcaatttattctcttttaaaaaattaacattgtctcaagttatttatattataggcggtgcactattaatttatgggttagataatctttatttatattttcatgacgtaccggcaaatgaacaacaattagagcaagaaatacgaaatacaccattctatatttctattttcactgttaccatcatccccgctattgtggaagaaattgtttttcgcggtatgataataagggttatcttcagaaaacacttgtttttagggttaattgtgtctagtttagtttttgcatcattacacgaatctgacacttggattggttatttaccttacttatattctggtttgatttttggtataatttatataaaaacaaaacgattagaagtggtaatattcatgcacttcttaaataacttgttagctctgctctttataatatggggataattttgagataacctttcatattattttcaaattatctatctgatatttattttattgaacttgagtcaccacttaaactcaaaaatacgtgtcatcaagtgcaaaataatttagaactaatacaaacataaaaacttttgctttacgcttaaaatcaaaagtcacatacctagatataagtacaacttgtatattttgtactctaataggtatgtggcttaaataatatttaattcttaagttgcatatagtaattgtttttattcattttctaaaatatgcgagactaatttccttttctactcctgttgaatcaatttagacttttttataactcgagcttttacttagctgaattttgacttcttcttcattaataactattatggaaaaacccccataagcacaatgcctatgagggtttaaatatatttatatattatagaatagaaagacctgaagattgaatatctttcgcaaagcctttaactgtatctactgataattcgttaatatcgcgacctaagtttgtattcacttttttcacaacatctgcagggcatgtaataatatctgcaccaatttcatcagcttgaatcacattgaataattcgcggcaacttgcccataataatttaacgccgtctttactatgcgtaacttttacagcctctttcattaatggtaatggatctacgcctgtatctgcaatacgtcctgcaaatactgaaacatatgttggcacaccttcagttactgcttcagttatttctttaacttgttcaattgtgtaaacagccgtaacgtttaatctcacattgtcagctgaaagctttttaattaaaggaatcgttgattcaccttttgtatttacaataggaattttaacaaatacattttcgccatattgttttagaattgctgcttctttttccatagtttctaaatcgtctgcaaatacttcaaatgaaattgaagcatctggaatttctttcacagcttcttcagcaaaagctttgtaatctgttacgcccgctttcgccattaaactaggatttgttgtaaaaccatccacttgtttgtttttataagctgctttcatttcttcaatatctgcaccgtccgcaaatacttctacatttagtttagccatataatatagcctccttgattcttattaaaattttaacaacatctgcatgtctttttcttacaaccatttgtaaaaaatgatttttatttctttgttatataaaacatttatatcacgcttttataatatatagctaattttttgcctatatttttaaaaaatgactttagtaaacattgtgtctacaagttaataaaactattgttttatgattgtttatgatacgatatgtaaatgataaccatccaggaggtctagcatgtctcgttcaaaaaaatacttttacttatctagcttaatgattattttaagctttttctttaatacaaataacgttttcctaagtggactttttaattcttttattaaattaatacttttctgcagtgttattaactcaattgtactaattttgtctataatttttgcagatcgttcaattaaatcactaaagcctgatgcagattggattagaattgcgagtaaaagtttgccttggattattctaattgttattttagtacatatcttttcaattgttcgtacattcggttttatttaaaaaagataaaatgtcaatgtagccttaatacaaaacaatacaatgtatcatgctataatgagtaaaacaatttgatgacgttgttgcgtataaaaaatattagattttcgaaatcataactatacatctaatcgctatagttatacaacaagatataacatataatgaggtttgataatgcatcgacaatttttgtcgtcgcgttgccaaaacctcttttttaaattcaaactacttcttttcgaggtgaaccaaatgcaatatgtatatatttttatcggtggtgctttaggcgctttattacgttacctcatttcttttctgaatactgacggaggttttccaatcggaacactgatagccaatttgactggtgcctttgtaatgggattgctaacagccttaacaattgcatttttttcaaaccatccgacgctaaaaaaagctattacgactggttttcttggtgctttaacgactttttcaacatttcaattagaattaatacatatgtttgatcatcaacaatttataactttactactatatgctgtaacaagttatgtctttggtattttgttatgttacgtcggtataaaactaggtggtggtttatcatgatatcaatcattttagtcatgattggcggcggtttcggtgcaattactagaagtgccattactgattattttaatcataaatttacttcaaagttacctatcgcaacattgatagtaaatctagttggtagttttttaattggattaactataggcctatcaatttcaatctcatggttccctgcgttctttgtcaccggttttttaggtggcttaacaactttctcaacgttagccaaggaacttacattaatgatgacaccaaaatttgatattaacctttttctcaattattcacttttacaattcatcattggatttatagcttgttatattggctatcatatttaaaaataaaatgcttcattcagcaaataggtaaattacgacaccttcctgaacgaagcattttttaattttcatgcaaattttttaacaccatataatgccctatcaaaataaaacaatctttgttgccgtttaaataatgtgaatgtcaataaattctccaaactagtcgaaaataaaacaggctgggacataaatccctaaaaaaacagcagtaagataattttcaattagaaaatatcttactgctgttctctatttatacaatacttcgtattgaatggcttcgctttcctagggtgccgtctcagcctcggtcttcgactggcactgctccctcaggagtctcgccattaatactacgtattaacatgtaattttacttttacatactttaaaaaaataagacactttgcccaacttacactaccaatagaaacttctgttagaattccttaaaatgatatttcgcgatatgtaaatgaaattgttgaaacgatacctgatagcgaattcgatgaattcagacatcatcgtggcgcaacatcctatcatccaaaaatgatgttaaaaatcatcttatatgcatatactcaatctgtattttctggtcgtagaatagagaaattacttcatgacagtattcgaatgatgtggttagctcaagatcaaacaccttcttataaaactattaatcgttttagagtgaatcctaatactgatgcgttaattgaatctttatttattcagttccatagtcaatgtttaaagcaaaatcttattgataataattcaatttttattgatggtacataagtagaagctaatgccaatagatatacatttgtgtggaagaaaagtattcaaaatcacgagaagaaatagatttaattggtagtcatttagataaagaaatcgaagatttaaatcattctatttagaacgaagattgtgctcaaattagaaaacagacccgtaaaaaagaactgagattaagaagttcaaaaagaaatttgatgattattccgaaagaaaaaataaatatgaagaacaaaaatcgattcttaaagatagaaatagcttttctaaaactgatcatgatgcaacttttatgagaatgaaggaagaccatatgaaaaatggccaacttaagccaggatacaatttacaaatagcgacaaattctcaatttttttatcctatgacctatttcaaaccccaacagatactagaactttaattccatttttaacaatgattcaaaatacattcggttatttaccagagtatattgtagctgatgcaggttatggtagtgagcaaaactatatggttattatagatgattttaataaaacgccacttattacgtatggcatgtttattaaagataaaactagaaagtttaaaagtgacgtttttaacactcaaaattggaaatatgacgaacttaatgatgaatttatatgtcctaataacaaaagaataggttttaaaagatatgcataccgtaatgatagacatggtttcaaacgagacttcaaactatatgaatgtgatgactgttcatcatgttctttgagacatcaatgcatgaagccaaattagaaatccaataagaaaattatgaagaattataattgggaattctttaaagcccaaattaatcaaaagctttctgaaccagaaacgaaaaaaatctatagtcaaagaaaaattgatgtagagcctgtttttggatttatgaaggctattttgggtttaactccaatgtcagttcgaggaataaataaagttaaacgagagctaggttttgtattaatggcacttaatataaggaaaatagcagctcaacgagctgtacattataaaatacatatcaaaaaagctgatttctatcaaataattaatagaaatcagcttttttacattgcctaagaacttaatgtcccaagccctgacaattcatctaaccttttcatcagttgagcgattttaatctatccttcaaaagtttttggatcaggtccaattctcttatcttgatttaaaccatcaattcgcgtcatttgttcatctgataattcgaaatcaaatatttggaagttttcagagattctgtttggtgttaccgatttagggattgtaaccacaccatgctgcacattccatcttaaaacaacttgggcaggtgactttcctaattcttgagcaatgtctttaattgtctcatcatttaaaatttgtgcattcatcaatggtgaccaagattccatcacgatacgttgtgctgccaaatataatttcaatttatgttgggttaaatatggatgatattcaacttgattaattacaggtttaattgacacttgtgccaacaaagcttccaaatgttcaggttcaaaattgctgacacctatatttttaactttattatttttatataaatcttccatacctttccatgtatcaaccattacggcttcgttcgtacctggccaatgtactagatacaaatctaagtattttaaacctaatctagataaactagcttcgtaagcagctgctacattttcacgaccgaaatcctcaaaatataattttgaagtaataaataagtcttctctagcaataccagttgactccaatccggcacgaatgccagcacctacttgttcttcattcccataaacttttgcggtatcaatactacgatatccttgttcaatggcatacttaacactttccatgcaattttcatcattttccacacgaaatgtccctaaaccaatttgtggcatcgtgtttccattataaaatgttttaacctccataaatatcgcctcacctttttgatgtattataccctgttatcataacaaatctgagttgaatacatgagaaaaaacacttagagcaatcaaccactaaaattctagtaatatctctcaaacattaatcaaattgtaaaagcaattatgtttaatttatgacaaactaaaaaagccgaagtaacaacatatagtcatcacttcagcctaacatttaattgaatgattcaattttatccatcatttgttgtaagtcttccacgttgtattgaatacgaccatggaatacaaatttgttaaagaactcgtctaattgttcagcaccgacaagcactttgacagcactattttgattataatttgaaatcgttacatcgccttcatttttaggattaaagtataaaattgaagttggcgtatatttggcacctaattctttttgtaagtcttcagccaattgtttaatcgcctcaatttgatctgaataatttacaaatgataatgaacgtttgtcatcattttgatccatcacaatagtttgcggtctagatttatctaaatccaatgtatcaaatacttgttccattggtggtaaatctttaaattgaccgccactaataccattataaacatgaccttttaacaattgagaatcaataatataaagaccagttcttgttaatactaaatgactaattcgttcaatattattaaagccatcctttggtaaaaagatatttgccataatgtgcatatcttctggtcgaattcgtttttctttaactaatctttcacgaataccaattaatctcatgtccgttacatattcactatgatttttcgagaacaattttaatgcgtcaatctcacgatcttttgtactaaccatgtgattataatcttcttgttgttttgtaattgtctttttattttgaatacgctctttctctaaagcttcttcatgagactttttaatgttttgttcttgttgttcatacttttcttctgtttgtcgcttaacttttttcttactacctaaggcaactaagaaaaggacaaaaaagattaatgcaatgactactgcaataatgagtccaatgactaccggtgaagataaatccatcacaacaacgctcctttttaatatatgaataactttaattataatagaaaagctaaagattttcgatacatattatcatttatatatcgaaaatcttttatttagctatattcaattcatcttattattttactgcgtcttttaattcttccactttgtctaatttttcccatgggaataagacatctgtacgtccaaaatgaccataagcagcagtttgtttgtaaattggttgtttcaaatcaagcattttaataataccagcaggtcttaggtcaaagtgttttctaactgcttcaacaagttgcccttcagaaactttacctgttccaaatgtatcaattgcaattgacactggttctgcaacaccaatcgcatatgccaattgtacttcacattgatctgctaaacctgctgcaacaatatttttagccacataacgtgcagcgtatgcagctgaacggtctacttttgtaggatccttaccactgaagcatccgccaccatgacgtgcatagccaccgtacgtatcaacaatgattttacgtcctgttaatcctgcatcaccttgaggtccaccgattacaaagcgtcctgtaggattgatgtagaatttagtttgttcattaatcaagttttctggaacagttggataaatgacatgtgctttaatgtcttcttgaatttgttcaagtgtcacatcctcagcatgttgtgttgatacgacaatcgtatcaatacgtactgggttatcattttcatcatattcaacagtgacctgaactttaccgtctggtcgtaaataatttaacgtaccatctttacgcacatctgataaacgttttgccaattgatgtgataaataaattgctagaggcatatacgtctctgtttcattcgttgcgtaaccaaacattaaaccttggtcacctgcacctgttgcttcaatttcttcttcgctatctttatcacgatactctaatgctttatccacgccttgtgcaatgtcaggtgattgttcatcaatcgcagttaaaattgccattgtttcataatcatagccatattttgctcttgtgtatccaatttctttaattgtttctctaacaactttcggaatatcaacatatgttgttgtagaaatttcgccggcgatcaatgccatacctgttgtaacagttgtttcacaagctacacgtgcatttgggtcgtcttttaaaatagcatctaatattgcatctgacacttggtcagcgattttatctgggtgtccttctgtaacagactctgaagtaaataatcgtttgttatttaacatagtttgctcctttaaatttatattacgaaaattctctctctgtgagctaaataaaaaagaccttctaactattaatatagagagaaggcctaatacgtccattcgctcttatcgttcagacctatttgtctgcaaacggtttggcacctttcttttataaaaaaagaggttgctgggtttcattgggtccatgtccctccaccactcaggataagagaatccgttaaaaataatagtacctaattaatgaattaatgtcaatttttcacaaataaatttacagtaaaatattgtagattaattatgttaatgtgttatactaattaaatgtaaaggcttacatttaaattatcgctttggagggatttaggatgtcagtagacacatacactgaaacaactaaaattgacaaattactgaaaaaaccaacgtcacattttcaactttcgacgacacaactttataataaaatcttagacaataacgaaggggtattaacagaacttggtgctgttaatgcaagtactggaaaatatactggtcgttcgcctaaagacaaattttttgtctctgaaccttcatatagagataacattgattggggagaaattaatcaacctatcgatgaagaaactttcttgaagttataccataaagtactagactatttagataaaaaagatgaactatacgtatttaaaggctacgctggtagcgataaagatacaatgttaaaacttacagtcatcaatgaattagcatggcataatttatttgctaaaaatatgtttattagacctgaatcaaaagaagaagctacaaagattaaacctaacttcactatcgtttctgcaccacattttaaagcagatccagaagttgatggtactaaatctgaaacctttgtcattatttcatttaaacacaaagtcattttaatcggcggtactgaatacgctggtgaaatgaaaaaaggtatcttctctgtaatgaattatctcttaccgatgcaagatattatgagcatgcattgctcagcaaacgttggtgaaaaaggcgatgttgcattattctttggtctatctggcactggtaaaacaaccttatcggctgacccacaccgtaaactaatcggtgatgatgaacacggatggaataaaaacggggtctttaatatcgaaggtggctgctatgcaaaagcaattaatctttccaaagaaaaagaaccacagatttttgacgcaatcaaatatggtgcaattttagagaacactgtagttgcagaagatggttcagtggactttgaagacaatcgttatacagaaaacactcgtgccgcttatccaattaatcacattgacaatattgtagtaccatcaaaagcagcacatccaaatacaattattttcttaactgcggatgcatttggtgttattccaccgatttcaaagttaaataaagaccaagcaatgtatcatttcttgagtggtttcacttctaaattagctggtacagagcgtggtgtgacagaacctgaaccatcattctcaacatgtttcggtgcaccgttcttcccgttacaccctactgtttacgctgatttattaggtgaacttatcgatttacatgatgttgatgtttatcttgttaatactggatggactggcggaaaatatggtgtaggacgtagaatcagcttacattacacacgtcaaatggtaaaccaagcgatttctggcaaattgaaaaatgcagaatatacaaaagatagtacgtttggtttaagcattcctgtagaaattgaagatgtaccgaaaacaattttaaatccaattaatgcttggagcgacaaagagaaatataaagcacaagcagaagatttaattcaacgttttgaaaagaacttcgaaaaatttggtgaaaaagttgaacatattgctgaaaaaggtagcttcaacaaataaatttgaatactaattaaagagccaaccgttgttatagtctaacaatggttggcccctcttattttatgtgctaaaaatttataggcaattttattacaactatgcacatttaaggtgaccttcatgccaaactcgcatcactcatttaatggaagcagcacgtcttcatataaagtaccgatccctaattcaacgcatgtagtaccacatcttcaaagcttgatagttcccatgcgcacaccacgtttcatactagctatgcaactcaacttggttcataaactctttaatataagtcaatgtttcaaccatcgctggtggtcttggcacatgtccttctgccatttgataaaatgtttcatgcgtggcaccttttaactctagttggtccgctaaataatacgcatgatgaataccaacttgctggtctttccctccatgtacaattaatattggcggactgttttcattaatgtttggaatcgcttggcgtgcctcatatgccgctcgatcttttttcggatgaccaatcattcttcgtagcatacctcttaaatcgacacgttcttcatacattaaatcaatatctgagacaccaccccagattgtataacttgttactggtaagtcttgaaatgtcaacaatccttgtaaaccacctcttgaaaaaccaatcatatgaataaaagcttgcggatatttatcatgtagcaatcttaatagttgcgtcacatcatttaaatcgccacgataaaattcgtctttaccttcacccccattgttacctcggtagtatggcccaatcactaaagtttgactatctgaaaattgcattaatctacctgcgcgcacacgtcctacttgacctttgccacctcgcaaatatactacaatgcgatttacttcatgatgtggtgtcatcattaaagcttttacttgtaagtcatctgacaaatatgtaatttcttcgaattgatgcgtaaaagattcaattggcattcgtttacgtttgataaaatccaagtgattgcaccctctctacgcattttaaaatggtactatcttgcagtaagaaactccgttgtgcgagttcaatatcattgatacagttaaacaacactggccctgctgtttctaaataatcgttcttgcttaccaatgattcaacttcgataaaatatacatcttttacaaaatcagtttgatcatgtgtttcaatggtatattgtgctatgtaatgaatatttttaactttggcgcctgtttcttcatataattcacgggtaactgcttcagcactactttccccgcgttcccttttaccaccaggaaattcaataccccgtaaattatgtttggtaaaaagcaattgatttttaaacgttggaatagctagcacatgattgccatctgctagctcattatcctttttaaatgtcaaattaacttgacgattatctttatccctaaacttcacgcgcatcacatccctacattgtatgttaatataatagttaattactatcgttggaggcattaattatgaaaaagatattcttggcgatgattcatttttatcaacgtttcatttcgccactcactccaccaacttgtcgtttttatccaacatgttcagagtacactagagaagcgattcaataccacggtgctttcaaaggcctttatttaggtatccgtcgtattttaaaatgtcatccgcttcataaaggcggctttgaccctgttccgttaaaaaaagacaagtcagcaagcaagcattcacataaacataaccattaatatggttgtaattgagttatatccactaaaggggggcgaaattcgagtcgcccctcttttaatatgcctgaatgcgccaccacatcttgttcaaaataataacctgctggtgtaacatctcctggataatcacctttacgagcaagcatcgctgtaaaataacggcttaaaccatattcgtacatgccgccaataacaacttttacaccatgacttttcaaagtatcaattgccgtttgcactttatcaatgccacctagacgaaatggttttaatacagcaactttcacattgtataattctatcaaattaattatgtccgacaatgatgtcgccttttcatctagagcaattggaggtattgttccatccactacgtcatcaagcatggagatatctttaaatggctcttcgatataaagaacctgttcacgcgctaataactgtaactgtgtgaaatcttgacaatccaaggactcatttgcatctataaccaattgaaagtgaaagtctaatacccgtaacactctaatttgatgcatgatttgaggcgtccattttaatttaattctggtcggctttgttgctttcaatgactctagttgtttatttgataagccgctcgctgtcgctccatatgctactgaaaatgaaggcagtacatgaaacatttgatacaatgccatgacaatagttgcccttgcagcaggcgtattttccaatgaatctactaattttagtgctgcttcatacgtttcaaatgatttatttctattatcttcgaaccattgctcaattacatgtttcactgaagcaattgtttcatgatcataccaatctgtttgaaaagcgttacattccccgaaatatctattccctttatcatcaatcaattcgataaacaaacaatcacgatgcgttaaagtgactttcggtgttacaatttgtgacttaaatggctcactatatttataaaaatgcaaagctgtcaacttcatcaaatcatcctctatacaacttatttctttgtaatttacctgttgatgtatatggtaaagtatcaaccttttcaaagtgtttcggtactttatatttcgctaaatgttgtgataaatatgcaatcaattgtgcctttgaaatgtcactttcactgacaaaatataatttaggcacttggccccaagtatcatcaggatgccctacacatactgcgtcaatgatacctggaaattgcttcgctaccgtttcaatttgatatggataaatattttcaccgccactaataattaaatctttacgtcggtcataaatcatgacataaccttcataatctatttcagcaatgtcacccgtattaaaataaccattttcaaacgtacccgttaaatctgttggatacaaatatccattcatcacattggcacctttaatcattaattctccatgaccttctttattaggatttttaatttttacgtcaacattggcacttggcatccctacagtgtcaggacgtgcatgcaacatttccggtgttgctgttaaaaattgtgaacatgtctcagtcataccaaatgaattataaattggcaggttatattgtaatgccgtctctatcatagtggcagataatttagcaccgccgagtaatatcttttgtaaatcataaggttcatgtaaaccttgttgcataagccaatttaaagtttgtggcacaagcgaaatgtgtgtgatgcgttcattttttatcatcgttaaaatttgttcggcattgaatttatcaacaatgcgcacagtaaacccttcaataacagctcttaaaagtacactgagacccgaaatatgataaatcggcaagacagatagccaattagtgtcacgatcaaatcccaagctctctttacatccgattgcactggcataatgattacgaaacgtttgtggcaccgctttttgagggccagttgttcctgatgtaaacataatcgatgcaatgtcatctaaattaaatgatgtatttaatatgttggacggcgactctttcgacaccacagtttcattcgatgtatcatattggatatccattgtgttgtccaacaaaccgttcattgtaatatcccttccagcgaattcaatatcatccagcgatacaatttgaaaccctcgcaattccagtggcaaggtacaaaaaatcaattgtacatcgattgacctcatctgattcgtcatctcattaggtgtcaaccttgtattaatcatcgcaatttcaatatttgccaaccaacatgcatgtattaaaatgatcgattgaatcgaattatctatgtatagcccgacacgagattgttgataagccttgagtcttttagccaatagactcgcttcacagtataaattttgataagtataagattcttgaccgtctgttatcgcaatatgatgtccattttgttgtgcttgtttatataaccaaaagtccatgcgttattcctccaaaatcatttacattataattataacgattttatgacattctagcagtggttatgtttaaaaatataaaaaagtagacgaattgattcattgatatgattgttataatgctcaatacatatcgttatatcattcgtctactattatcagttatttttatttaattttagtgtcattctgtcattttgatgtggtgatttacccattgttgccacatcatctgcaatgtcaattggtatacgattcatgtcttgtaatgcacttaaatggaatacttcatcatctaaattttcaatgagatatacataatatgttaccttgtcctttttatattttaacgttttccaaaagtccggcttgcaattcaatacattatccggaatatattcaataaataagtaacgtttgctgcctactttgtctacgaaatattttacagtgcctttttctatacctcttatatgtgcatagtctgctgaaaagtaaatactacctattgtttcattatgttgttgtatttcaaatcgttggcctactattttattatttgtgccacaactacttaaaaaaatcagtagatatagcattaaacatattttcatccccttgaatcttaaaaactttttcaaaagcaacacctctaaaaataaatacaatatattatatcaaatagaaattattattttgttaaattatgttgtcatgttcgtgtcattttgagtcgtaatacaactttacaattattaaattaacacttctacaacccaaaaatatttttaaagttttgaaaaaaattaaagtatttccactactaatttggtaaaatatgattatgtgatatagtgaaagcgttttacacttaataactccctcttaaatgcatccaggttttatgtagtaaatcatgaaaataacatataaatatagaggagatttacctttgaatacagagaacaacaagaatcaaaaccaatctgttaaaaattctgaaagacgcggcatgttaaaaggatgcggcggttgccttatttcttttattttattaataatcttattatcagcctgttcaatgatgtttagtaataatgacaattccactagtaatcaatcatcaaaaacgcaattaactcaaaaagatgaaaataaaaatgaagataagcctgaggaaaaatcagaaacagcaacagatgaggatttacaatcaaccgaagaagtacccgcaaatgaaaatactgaaaataatcaacatgaaattgatgaaataacaacaaaagatcaatcagacgatgatattaacacaccaaacgttgcagaagataaatcacaagacgacttgaaagatgatttaaaagaaaagcaacaatcaagtaaccagcatcaatccacgcaacctaagacctcaccatcaactgaaacaaacacgcaacaatcatttgctaattgtaagcaacttagacaagtatatccgaatggtgtcactgccgatcatccagcatatcgaccacatttagatagagataaagataaacgtgcatgtgaacctgataaatattaaacaacaagcgaattgaattcaaattgtatttagctttatgcactaatcacatagtaaataatgagggagattttttaggcatgagcaatcaattcaaaagcgaagaagagcgaagacaatgggaacaattccaagctttccaaaatcaacaaaaccaacagaaccagcaatacggacaaaagaaatctaaaaaaggatggttctggggctgtggtggttgtctagtattatttattttaattatcatcggtatttcagcttgtacagctggtattacaggtaaccttggcggaaatagttctaaagaaacgaacaaaacccataaaatcggtgaaactgttaaaaatggcgaccttgaaatcactgtaaattcagtggaaactatgaaatctgtaggaccgtctcttgcaccaacaaacgctaaaggtacatttgtcgttgctgatgtgacaattaaaaacaaaggtaaagaagcgttaacaattgatagttcaatgtttaagttaaaatccggtgataaaacatttgaagcagataatacaggttcaatgtctgctaatcaaagtgacaatggtagtatagaaaattcatttttcttacagcgtataaatcctgatagcactgcacaaggtaaaattgttttcgatgtgtcagaaaacatagccaacgcaaaagataaaaaattagaagttatttctagtttatttagcgttaagaaaattacatttgatttatccgatgctaaaaaaacatcaaaatctaaaaaagacaagcaagatacagaagtagctgttgcgagttcaaatagcgataatgtaaattatgaagcttcggctactacacctgctacaacttctagtgcggatactgattctgaagatagcgaaaagtctagtaaagatgaggataagcagaatgcgtctaaaagtgataaagatagtgtagaaaaaagtgaatctaatgaggaaactgctcctgtagagcccatgccccagagcaaacctaccactagtgaagcaccacctagtcaaaatattcacaatgaagatagcatgtacgacgcttcaacagaataaaatttcagggtagctcggctacccttcttttacggaaaaataaatatacatagcaatataaggagattaaaaaatgaaattcaaagctatcgttgcaatcacattatcatttttactattaactgcctgcggtgctaatcaaaataaagaaaataatagtaaatcaaatgacactactaaaaagacgcaacaaactgacaacactactcagtcaaatacagacaagcaaatttcaccacaagaagccgaagatatcgttcgaaacaattataaagctagaggcgttaatgaatatcaaacattaaattataaaacaaatcttgaacgaagcaatgaacatgaatattatgttgaacatctagtccgcgatgcagttggcacacctttaaaacgttgcgctattgttaatcgacacaatggtacgattattaatatttttgatgatatgtcagaaaaagataaagaagaatttgaagcatttaaaaagagaagccctaaatacaacccaggtatgagtgatcaagctgaaacggataatgagtcggaagacattcaacatcatgatattgacaataacaaagccattcaaaatgacataccagatcaaaaagtcgatgataaaaacgataaaaatgctgttaataaagaagaacaacacgataacggtacaaataattctgaagaaactaaagttaaataatggcatactttgattaattgtaatttttaggagaaacactatgataacatttgaaaatatacaacaacttgaaaaatacaccttaatgactatgcatggtctttttaatcaacttaaactcggtattatttcaatcgacaatgcagagcatacgctctttacaccttatatgatggaaacactctcttccctaggtgtgaaaccagacattatcgatttaattcacaaagggacagagttagaagactttgcagcatttaatttatcaattgaagatacagttacagtctgtttacaaagaactgaagaactattaaatcaatacaaaaatgtggaattcaatgacaaaatattaatcaattggcgtattatacaagagtaatagacatataaaagtcgaacgtaactaagtggatattgattttattctttctaaattacaagtatttcattttataaagtttgaaaagaggtatattgaaatggagaaaaacgaatatagagctaaatataatgaatatagtcaattattagacgctacttactcgcaagctgtagcataccttttaaataaatatggcactgtaaccgatgactattataaggaaaaatcatacacgcgatttttaaatggagaaatcaaaagtatttctaaaggaaaatacactagagctagcgaaggattatattgtcatcacataagcgaggacaaataccaaaacttatctgacctaagattcatttccgaatttaagtactcatacaactatcaaaaaaagaaaacttagtttactgcgatttaatcgagcatttaattttacatgcaattattacaaaagaatcccatggccaatttggtgtagctggattatgtcaaatgatcaaaccaactgtcattgattggtacattagcgaatataatccaaaaccagcatggatgcaagccaccaaagcacgtgcctatttgcctggaatattagttgagaaattactcattaaaattgacgatatgttaaaaggaatagaaatatatgatttccttgagtctagataaatgattaatggagatttattttttgctgttgagattttgttatagatatttaaacctgtaattaaatatattttataaaaatagaccacgcatacctatctataaacggacaatgtttacaaatgagtttgcctggtcttgaattgtattagttttcttttggttttaataaatcgactagattttcacaatatttatcaaatatgtattcctaaattatacagccttaatccagcagctactttcgaaacttccaacttagttgatataaggttcaatagtttgtttcgttctttttcagataaaccagaacttaaattgatattattgacttcataaaaattatagactaatgcctctatttgctttttaggcataagtaagtcgactgaaaactgatttacgtcgctttcataaatcatttcatgtaaattctttagactattatcgttgttatctttaattttgtataaataacggccgagttcacgagctattgaaaatcttgtattattaatcgagagattattattgatataaatcgttcttccacttaaataacccgaagtattactctccattttaatatatttaacttttaaattaagttgaaataataccttgtctatgtcaatagcaaaatgttcagaagtaataaaaagttgatccattttgtccttaactaatgactgaattaattgaactatttctggttctaaaatatcttcataatgaactttctcaataactttcaattgattcccctacctaacttaaaaatcgaacctacattatttaataaatttaaaactataggtgtaaacattattaaaataaaacccctccactactatatgtaacgaagggacatgatttcaaaataaaataccttttttataaatttattataatatttttcattatactgtacaaccgaatctaatccaacgatcccgaaaagaagaacaacggtggctcggcttcatattcatttttgtccaagtgttctttttcaattatttgattgacggttttccaattttttacttcttgccttttaaaaaatggctatgaaaaattctatccccatagatttcttcatagccaatgttaatttgtttcatgtcatttctttaaaattcctaaaaatatataaactaaaagcataagtaacacagcaaaaattgccgaatatataattattgaaaaagcattgctttgcattggaactaaataatttaaagtacaaaataataataatgctaaaattccaactttaagtgaatattttaatctatccataaaatcacccttactgatatccccatttttctcctgtcagaacgtattccccggctgcattctttttagtttttaattttatatatattcccttactagtatcaatattcgatgcagctatagatccaaggaaaccaccaacacctgcgccaactaaacctcctgttagtgcagaaataacgctaatagcccccgcacctaaagcagctattgtttttgtatatgcagaagaaagatataatgttgcagtatctttacctgtttctacatattgagttttacccgctctcaattggtcttcagctttatatttttttatttcttcttttgtaaatatatcttccagtttataaccttttttctcaagttcatcaaataaattttggttactcaaatatattacctttgcttgagaatggtctaacttatcttcagcatgagctacatctgaattataagataatgaaattggactaacaaataatacaccagcagctaataataaagataatttttttgaatacttatccatagtaaaaacccctcttgtaaagttattccctatcaacatccctaaacacaatatatcataataataatttatcaccaataattaaatacatttcaatcaatatatttttcaaatttctaaaatatgcatctagtgtcaatagcgcttcacaaatgtgtattttaactatttaagattgtcgtgtttttaatacttaatcacttttaaaatctttttagtcagtatgattcttctataatctttaagattttcaaaattatttactagcttccttttgaattgttggttgtgatttagaaattcacgtcacaagttcaatataaaatattgtttttaatttttaataacagtttgagcggtagcataaatatatagataaatctaaaattacgcctaatatttgacatttcgttcttaattattttcttattatatttgccatcatcataaaaaacattgtttgttctgtaatgattatttaaaatactcatgtcctttaatgattgtgaggataataataatttttattacaccatacaaccgaatctaatccaacgatcccgaaaagaagaacaacggtggcttggcttcatattcatttttgtccaagtgttctttttcaattatttcatccactgttaatcggtctttagcatctttctctttcaataatcgccctattttttcttccttatatcctatgctactattaaactgatttccttcatctcctgtatttatatatgcctgaaatttatattgtttatcattatttatatatcctttaataaagtaagcattcacagggcttttttgaaactttgttattttcatagacttataatgattcaggttatgctcaaaatacaaatcgattcgcttttcttgtgtctcaatataatgttcttttttacttttgtgaaacgcgtatgcaataacaattagtactattaataatgcaacaactaccacaaatacatatctctttttcattttaacccccatagtttagtatttatttcttatagattttagatttcaaaaaacaattcactttgacatgctatcttttttctatgttccgtttacgcccctcatgaaacgttgtttcaaaatacttttaaaaattatttgcttgacataattataaatacataaaacaacgctgttatatatgggtttataaaatgtaggaaaatggcgaaatgaaaatgctgtttttcctaacgtcaaaggtgttaaatcatactcgcgtataatttcatttcttggtttaccattttcatataatctaaccatttataacttaaacactgaactaaatgttcttctttcttaaattaacaaaatctactctcatagaatttgtccaattagatgatataatagtagagtcgcctatctctcaggcgtcaatttagacgcagagaggaggtgtataaggtgatgcttattttcgttcacatcatagcaccagtcatcagtggctgtgccattgcgtttttttcttattggctaagtagacgcaatacaaaataggtgacatatagccgcaccaataaaaatcccctcactaccgcaaatagtgaggggattggtgtataagtaaatacttattttcgttatttcaattatactgctaatttttctttttgtaaaatatgcaaggttttaaagagaaacatcaagaactaaagagtgctctatgtcaaattggactgatgcgttcaatatcggaagttaggcaactaaacattgcttaacttcctttttactttttggagcgtaaagttttgaacataataatattcgattgcgcaaatgattgtaacttccataaccaaaagatgtacgtttaattaattttattttgttgtttataccttctaatggaccatttgataaattgtaataatcaaaggttacactattaaaagtgtcacaaattcttatgaatctggcataaacttttaattaactaaataagtaagaaaacctcggcactatatcattttaatagtgtcgagatttttatagatactacaaatatttataacatggttaatttcatctaatgacttatatttttgtttcatcacaatatgaacaattatttattggacgtattttgctctttctttatttcagaaactgacttaggattttcaataaattttctacctaattcatctgtataagaaatatcggtatcaaattgaaaatcatcaatagatcttataccagctgtaaatgataactttttatcattatttatataaccactaatagaatagccatccattgggttttctttaaaattagtaaaacttatatttttataacctttcacattgtgcttcatataaatcgttattctttctttttgctcattatagtattgttctttttcatcatgtcctattttcaaatatatagctaatactataattattaatattactgtaactaaaactttaattttcatcttttttatttatcttcttctttaattctgaaactgtttttcatcttttatcatcattctatccagtttatcactatatgatgagatgtattcaaattgataattatcttcagaccacatatgcgctgaaaaagtattagtcttgtcattatttatataacctgtaataacaaatccatctaaagggttttctttttgttcctcgaattgtatttctttaaaccctttaacattatacttcatataaattattattctttctttttgttcatcataatatttcttttcgtcgtatttcatcttcaaaaagattccgcctagaatcaatattaaaattataattacaatcataagagattttttattcaaaaaatcaatctccttttcactggacttattgacaaacattttaaataaattaagcatactgagttttacgatgattgtataaacgttgcaaatcatatgactgttggttttaacattagtcaatttttctttcttataatcttaaatcatgatcaggtttactttaaaatttaaataattatatttttcatccattctatccataacatttattcaattggacctgaaaagaaaaattacggtggatcggcttcatattcacttttgtctaagtgttctttttcaattatttcatcgactgagagtttatatttagggtctttttctttgaataatttgcctaatttatcttcatggtaaccaatatctttctgatattgattattgcttcccgaatctatacttgcttggaatttatattttttatcatcatttatataacctacaatgaaatacccacccatcggagttttatgaaaatctgtcaccttcatatttttataattgttaagattatgcttaaaatacaaatcgattcgtttttcttgtgtttcaatgtaatgttcttttttacttttgtgaaacacgtatacaataacaattagtaatattaatattgcaacaactatcacaaatatataattctttttcatatctattacctcaatttacctgaaaagatgaatagtgatgatcctaatttttatttgtttctatccaagtgttatttttcaattaattcatcataagtcttaatacttaaatattgatgtatgtctgatggtgctatcagatttttaaaccattagcttaaaaaaatattaatgattcaaattgaattttaaaacttagtctatgttcttttcatgcattgcaatgttatgttttttgttaaaaatatatcccaatcctaatgttgttattatttcatgtaatgacaattactatagaatagtttaatttaaaacacattttgcaactcgctacatatattatctcatgttaaatgtgttttttacgaatggaaataaattgatacacatatcttgaatagattgttatataaatagattatttcacttctatcatatcataagtatattaccaattaataatttaattattattttgcatatctaaaagtaaactacactgaagtttctgaaaatatatcattttgaacagatctagaagtcttcaatagcattcttattttttagacattaatatcgtaaaattaaaaaacttattaaaaagcccctcactaactcaattagcgagaggttttgtatagacttattaaacaaatattttttgtagaagcgattgttttctctgtttaaggttttggatttttaaatctgtttttgaatttaatacatctaaactatttaacaattttataattttagtacgttcatcttcgactggtattttaatgtgtatatttcttatgtcattccctgaaatagattcaaatgtactcccctgtgaaaaacggatccatttattttgagtggcaaaccattctagaaaataatataaaaatttatctcctttaattgagcatacacctctaccaatgcacgcattaatttgtgccatagctaatttgcctacaggtgctctaacagttaaaataatttcgtccttctgaattaatttggttacttcccttgtataaatacggggattaattaatccattctctatatcagcatttccttggattaataccgtatcatttgagttatcagtataatttacacttttcggactttgtcccatagtaacagttgtaacttcacccaatctttcatttgtccaatctggataatcattaccattctcatctttgaatcgcaattcttgcgagaagattttctgcatatagccttttttctgttgttgaagtaattcaagtttttgttcttctaattcaatttgccggtcgagtttgctgaagaacttgcctattttttgctgctctttatttgtagggacaaatctatttattttattaatggtttgtttgcttaagcttggcacacctgttgattcatcgtatactttccagtttatttttctaaataaacttaatataaatagtatgtctgtttcttttttaggtgtacaataaaataatgtatccaccgtccaaaacggcgcctcaagcaaatatggtttgtttatagtcccttttctcccaataccaacagcatcaatttcacttagtggttctgaaacacttgtcatataaccgccagtaccatagactggtatatcgcctttatccaaatgtttataatcttttccagaattaacttttataatattccctaactgcttctcttcccattcgccttcaaactctgggaatctcaactctggcacatttttcttttgtgtattactcatctttcaacacccctagttctttcaggtatgcattgatttcttgttcaatttctgcgatttctttgtcgatatttttcaaatcttgttggacttgatctaaatcaatcggtgcttcttcttcgaatgtatcaacatatcgcggtatgtttaagttgtaatcgttatcggcgatctcttgtaatgtcgcgctgtagctatatttatcaatcgtttctttacgcttatatgtgtctataatacgttcgacttgggcatcgcttaaatggttttgattttttcctttttcaaaatcattggatgcatcgataaataatacattgtcgtcttgttggcgacattttttaaatactaagatacatgttggaatacttgtcccatagaaaatattcgctggcaaaccaatcacggcttctaagtagttcttttcttctattaaataacgacgaatgacaccttcggcagcacctcggaataatacaccatgcggtagtacaactgccatggtaccttcatcgtctaggtaatgtaccatgtgttgaataaaggcaaagtctgctttggattttggcgcaagcttgccgtaaccactaaatcgttcatcattttcaaattttgaatctgctgtccatttcgcactatacggtgggttcgcaataaccgcatcaaatgtatggcctaaaaaggctggattttccaacgtgtcatcattacggatatcgaaattttcatatcgtacatcatgtaataacatgttcatgcgtgctaagttgtatgtagtattgttacgttcttgtccgaaataacgatacacttgcgtttctttaccaacacgtaacaacagtgaacctgaaccacatgttgggtcatacacgtgacgtaatttatctttaccgtctgtgacaatcttcgccagtatcttagatacttgttgtggtgtatagaactcgcctgcttttttacccgctgtcgccgcaaagcgcccgataaggaattcatatgcatctcctaacatatcaatttccatatcactgtgaacgaatggtaagtcgtcaagattaaccatgactttagagattaaagcagtacgttctttgacattgttacctagtcgcgttgaactcaaatccatatcgctgaacagaccgataaagtcattttcactttcttcacctagcgttgatgtttcaactttacgaatcgccgtcgccaaatgttcgatatcgaaatcttgcgtttcaatttcacgaatcatcgcactgaataaatcttgtggctcaatgaagtaaccgacttggtcaattaattctgcttttaaatcttcacggtattcttcgtctgcccatgcttcttgatacgtgatgtcttcacctgacaaggcatctgcatattcttgttccgctttttcagataagaagcgatagaaaatcaagcctaaaatgtaattacggaattcactcgcatccatgtttcctcttaaatcattcgcaatcgaccataattttttatgtaattcagcttgttgctgacgttgtttttcagtaatagacatgtgattcctccgcctttgaataagtaatttatctctttgtgtaatagatttattataacatttggttatgttgcgatgtggagaattttgatgttggtggtggaaattttgagttttagtggcgcaattgttattgaaaaattttatagaaatgttgtagctttcaaatgctttcaaaatcatttatattcttaatgatgtcaaaaagttgttcattcatacataaataaaaccaatcaacaattgagttggtgaaaatcaatcgttgattggctttgatgcatattaaataatgcaatatatattaataaatgttagttatagtatattttgtcaggattgggtgaatgtctaagttttaattatttatctaaattatctgcaataaatttcttaatttcaggagagaaataaacagcaaatgacctcgtactttcacctgttggtttatcactagcatacataacaccaattgcttctcgcttactatttaatataggtgaaccagagctgccaggttggacaaccgcatcagatgtcactatatttccattcactgatagcactttaccagttgattcatacatttgtagtttatttccattaggatttggataaccaatgactgatatagattcattttctttagcttctgatgctatattaaatttactagtgaaatctttgaattttctaccttttggttgtgttgatttttcttcaacttgtacaaccgcaatatcttcttttccaggataatctacaattttagtaactttatagagtccaccaccattattataaaaaccattaggatgcgcttttatttcatcaccgactttcatgtgataagtaacatgtttattggtaatgattgtatgatttccaacaacaaatcctgttccagcgcccatccatgtaacaccactgtatggtgcaacattcgtattggtaattaatttcacactattttcggctttggccgtttgttgaataccatcaaccactgttgtgccgacaccagttattgatgttaaaatcgtcaatgccgcaatacttttgatgattatatttttattcatttttctgctcctctgtttattcatgatgcttttgatatagacgtttttttatgttatattcgaccgatgtttttcattaaaattattgaacacatgctcatggtgtatatttaaatttgtttattgttcaatgtgcttttgaataaaatctttgatttgaggcgtaaagtatacggcaccattatattcagaaccaatttttccaataccgccatacaccacacctatgacctcattgttagaatttagaactggtgatcctgaattcccgggttcaatgtatgcatcaaaatttaaaatattgtctttgattctttttatagttcctgtagattcaaactgtttaaaactattttgagcaggtaatgggtaaccaataactttaattttgtcatcaactttagcatctttcgcaaaattgaatgcttggacattttcattaaaattaaagccttttggtccacgttcgactgcttgttcttcaatattcatgacagagatgtcttcatcacccggataatcagaaatgcttttaattttatatataccaccatttcctttgtcaccgtttggatgggcagtaattctatcgccaactttataatcttttgatacatgtttattggtgataattgtattttttccaattacaaaacctgtcgcatctttaaatgaaacgacgccattatatggaaaaatatttgtatctttaacttgcgtaacattcttctctgcatttgctatttgttgtgtctcttcaacgactgcagcatttattccagttactgaggttagaatggctaatgctgccatgcttttaatgactatatttttattcattttcaagctcctttacaattcgagatatgttgcaacgctcgtttaaagtcaatttgtttatttatctatgttttctgcaatgaattttttaatttctggtgtaaagtagacgccatatgcatttctgttatcatcattttttacatcagaagcaaaatgaataccaactaattcgttgttgctgtttaatacaggtgatccagagtttccgctttcagtatgcgctgaatatacaatactgctaccttctactgacatcacagggccagttgactcatataaaacatatttatttttgtatgggtgtggataaccaatcactttaattcgctcaccagctttagcccctgccgcatatttgaatggcgttacattatcattaaaattaaagccttttggtccacgttctattgcacgctcttcaacttgaatgactgatacatcttctttacctggataattaataatctttttaatcgaataaataccaccattacctttatcactatttggatgtgcagtaattctatcgcccactttgtaatttttcgacacatgtttatttgttaaaatagtattctttccaactacaaatccagttgcacttttaaaagcaactacaccagtatatggaaaaatatttgtatctttaacttttgtgacattattttctgctttggcagtttgttgtacttcctcaaccaatgttattccaatacctgttacagatgttaaaattgttaatgctgctaaactcttgatgactacgtttttgttcattttaagttcctcttttttaattattttgatatctagatacataattcagtatatttagttaattatgtaaccgttttcttaatcactctttaaaaaatcaacttcacgaatgaattgatgatacttatttttcaatattattttgaataaattcttttaattgtggtgtgaaataaacaccgaaattcttttcagattcatcttttccactacctgcatataaaataccaatcagttcatgtttagaattcaatacaggagatcctgaattacctggttgtgcatacgcatcaaattccataaacgttccactgatatggttaatcgttcctgtcgattcaaacattttatattttgtttgtgcaccctttggataaccaataacagaaattctatctttcgcttttgctccgtctgcaaattttgtataactaacgttcttattaaaattcaaaccttctgtacttgtttcatgaacatgaactatcgcaaggtcttcttttccaggatattctacaatgtctttaacgtcgtagtttcctccgcctttacctttgctcgaatgatgtgctgctactctatttttaaaaatattattacttttagcgatatgtttgttagttacgattgtatttttaccaacaactacaccagtaccacccgcaaatgctaccactgaattgtatggtgcctttgttgcatcggtaatttctttgacattcttttctgctttggcaattgaatgaggctgattagaaatattttcagcgaaaccaagagatgttaaaatagttaaagcagttaaacctttaaccattacatttttattcatattttacctccttccaaatttatttttatagttaatgtatctagatacacatttactatatacattttatataaaaatattaattaaatattaattaactacttattaacatattattaaataattgtacatgaattgactcgtttatttaaatatgcttaaaactcaatatcacgcaattaaaattgactttttagaattattttggtcttaaatattaattgttgaattaaaattgtaatatttattcggaaattaggtaattgaaaatatatggcggaatggtgaacaattcatgtatttaaaatctttcactttattatttattgtgtttaacaatattattagcgattagttcccctattatttatgacaatatgcagtcaatcaatgaaacatgtatgtatgagtatatttggaactagtaatgtattgttaattattgaagatgattgaattatgaaatttttttcgagatatgttatttcggggatcagattttgcgatttcgccttggatagagtagttgcgatttgtaaatacgtttttcaggttcgattcaatttcgttgttaagataatatggattagtttcactgacatgttgatgcatgtcttttttgttctgataaagtataaaatgtttacttaacattacttagtatgacacctgctaattcaaacattatttgagacattcttttcaaattaattataaatttttacctatagactagtttgatatttatctacatctcaaaattctcatcaacaatctttcacatccaacatttttactttagtttttataattcaaaacaacaaaactatgttaaaaaattattctattttttagttaatagatagttaatatatttttgatatttagttaattgttcttttaaaaaattattattatattttcattgtaaacgtttacaatataaaaaaaggagcaattaaaatgaatacaaaatttttaggtaaaacattagtagcaagtgctttagtattaacaacattaggaacaggcttacattcttcatacttaggattagatacaaataaagttgttaaaacggctaaagcagatagtttaactgatggtcaattatggctaggtgttaaaaatcctttaattgatgcacaaattattagcggaaataaagacgaggaagttaaagtcagctatatacgtattgatggacaatcaaatagtgttacagcatatggtaataataatgatgatttttcaagtactccaagtaatttctctaaacttaaagaaattgacttgaagaaagaaaatgtaccaggaaatgattttaatactactgttaatggagatgaatgctggaataaattaacatcaaagttaaaagaaaagggtttgcttacagatggacaaaaagtaactatacattgtaatgataagtctaactccacaacatcaacagtatctggtaaggttggtgaaggaatctcaagtggcagtggaactgttttcactaaacgctttattgataaaatcacaattgaataaaccttaaactcaaatttccttaattcataaaaccttaataactaactctttcttacaaaccacctagcccataatatattaaaacgtcatttttatttcaattagcggaaaataaaaaaaccattccgcattaactttggcaagttggaatggttaaaaaaatattttagaagccagcgtttggcttgcttagacgacatgttcgcgcatgtcgtcttatttttacatttatataataacacgcaattcaataaaatgtctaatcaataaaactcaattacattcaaatacaaaaactttgcacctaatattcatcgcttaaataaacattacgtttaattaaccagacattgtcaatcgcgtctaatacccctgctgtccgaaaacaaaattattttgtattcatatttaactgttctctttcctcccttttcaacgcaactaaatttcttttaccgttagcgccccaatctttaatctttaattgttctaccgctccatttattaaatcctttaaagagtaaaactgctaatagcaacgtgataataatataaatcgccaatgttaatgtaactggtatactcccttctataaacatataaacgtaacgtgtagcatatgtgattggtaaatagaaccacgaatgatctccaagcacttctaagccaaaatagacgttaaaaataaacattaaaactccgacaacaatagccattacatctttaatgaaaaatatatctaacattatcacaaattattaataatgttaaaaatgacggtattaaataaattaataaatattccattgtcatgtattgctatacgattatgacgctaaaaaggaataattattaagtttatagaaaacatctgtataacttactacaaatactgaaaataatataaggatttaagatcgtaaaatctaaactaaggagatgtttaaatgcatttgaaactgaacgatgaagatttaaattatttagtaaatctaagtaaagaaatacttgaacaatacaacattaaattagacgaaacttgtaagggagatattaacataacatcatgtaattctgaatactttttcactttaagctattttttaaagcctggaaaagcaactataaatttcagagaatgccgttacaactatagcttgttacgtttaaatcttaatgacggttttcataaaaactctaataatgagaaaataaggggaaatagaattaatatattttctgaaaaagaatttatacaaaaagctgacggcgcaacccatatgaaagcatatcctttaccttataatatatttgacgatagctctgattttgtaaaacaattatttactttgcttgaatatacaaaaactaatcataatgataatattaaaattgaaactaatctattcatgagttggtgatactatgcatgacaacacaattaaatctattagcaaagactattttgattacttacaaacagaatcaaagtttatcccattagaaaatgaaactatagaattttattcacctatcgtcgattattttggtgattctatttctgtaaatatatctttttcaggggatcgatataaactaactgatcatggtgaaactttgtggaacatggaacaattaggtatagatttaactagtaataaaaaacaaaaaaagtatcaacttctcaataatattgtacaaaactacagtctagtcatcgaaaataagcacataaacttttatacaaatagaataaacttatctcaagctattcatgattatgttttggctatttccgagatcagttatttgggaatattaaagaaagaaaatattaagtccttatttaaagacgaagtgatgcaatattttctatcaaacagaaagatttatcctaatatatttccagaatttaaggtagaggggaaatctaagttaatccatagtttcgaagcagtatttccaggagaagctacagagtatgttaaaacaattaaacgaatcgataaaaacaatgcaaaaaatgtccttttcgattggaatgatgttgaaatacatagaaataaaaattttgattctaatgctagacttaatatcattacagaacaacaagatgatattagcgaagcagtatcaacaatgttgtctcaatataatgtagaggtattttcatttgaaaacaaaaaacaacttgaagaaaagtttagtaacgtataattatcgtgttatataatgtttcttggataatagtttctatttcaattaaatcaccgatacttaaaatgataaatttaccaataccaagtttgtaatgaactttcaccgtcatacaattatagatgctatatatataaaaaagaaccacgccgattaagacgtggttccatttttttaataattttttatatgttggaagtttctaaataattctactttcgcaaatttagcaccctgctatttagcaaagcaatctacatttccctaactaaaaattatcatgtgtgtaaataaaaattatgttagttctttaattccatttgataattgaaataattgcactttgttgattatttaatcatatacaattctatactccaggattagtttctttagaatccgtaccgattaatttaacagtatggttttgccagtcaacttcataagtagatgtaaacgttactgtattttgatttttgtagttattaccaatccagtgcaatcgattccattgattagtatatctatccatttctctttggtaagttactttgattttagatttttttgtatcattttgtttatgagaaagtacgcttataaattctgggttaaagttaccacgcgccaataaaggcatttgatgtgttggcaagaaattttgtccagcatttgaactactttgtctaccacctaaaaacagttcattaccatatgttgggtcataactatctctaccatatggtccccaaccattattcataattttgtgcgcctcaacaccccagccaattgatttatgatttgtttttctatcaatcgtagttctgtaactttcttgtttataatttatcgtttctgaaaatgattttgatccatttaatccacctgataagccattagatatattaatatctccgccataagaataacctaatgtttgttgaacttggaattcttcattttgatttttaggtgcatagtcaacaacatttacagcatcatttgattctgaactaaccgaaacattatacttaccgccccaataaaactgtgagtaattgtaatcttttggattaggctttttataacctgaattaatgtttccggctgccttaagtactaacgtatctttgtcataacttttatccttaatgaaattaaacgttaaaatttgagaaatattcaatttatcattatcagatgttgctgttgttttgtataaagtgattttgtcatctacttttttctcgcttacaggtgtgatatgttgagctgcatcaactgtattcgatagcaaaagcagtgcaattgatgaagcaactgatgatttgactaattttttcattttcatattaattatgtcctttcactttaatttcgtgtgttttccaattaacttcatatctaactacaaagtttctatttacaaatgcattatgctttctttctgcgtaaataccagttctagggaataaagtcgcatatgtaatatctaagtttctaccatatgaaatttcaaattcactcgtatcacttgaacctttttcatgtgatagtgtagtgataaatgatggattaaagccactttgaactaaaggtggcaattgattatcaggagcaaaatattctcttgctgaacctgttggaccatttggactttgtacgaataaatatctatcatgcgcagattttttaccatcaggcgtaacaaattcgtttgctttaacaccccatttaacagattttgagttttgcttgtctacttcactgacataactcttttgggtataactaattgttttagaataattaaatgagccattgccacctatagatggtgctgactggaaattacctccaatgttatatcctaatgtttgaccaacatcagtagtttctattttgtttttaggaaggtaattgattaagctaacatttggatctttagtcgtcagtcctatattatattggaatggccaaatcattcgtttagttaattcatatccactacccttcacatctgaaaatgaagttctggaattaataaaaccttgcattttaacaattaaagcgtctttgttatattttttatcttttacaaagtcgaattgaacattttgagtaacgccccatttcttactacttacatcctccgtacgtttgattacttcagcaccatcaccaatattctctatattagtattagctctagattcttgaatcggagatgctaaaggcgcaatcagtcctactgacaaagttgcagctaacatttttttcttaaacataagtttcactttctttctatataaatttttaatacaaatttattctagattatttcacttatttataaaattaactgttcattaaaaaataaaatgctataaaatattaaaaatgacacaatttattcatttatgatgctgaaaaccggtcattttggcgcaaccttcattacatttaaatagttccctttatactcgaacaatatgataaaattgccgatactcaactttttcgctataaaaatcaaaacgaactttaatcaagtcttaaaaaataatgtttgtattataaaaaataatctataattgaatttaaaattaactgattattaactattgtccgttaaacggagaggattacttcgtatactgttataactgaaatcttctatatatcatttcgtaatatcgctagcttcatctaaaaaatttaatgctatgatttagccgaattaaaaacatatatacttatttactatgaactaaaagtttatcctaaaaataaaaaaccatgatttcgaagtcttcataaactgaagcttctactctcatggcaatttatactatgatattcaattataatgcctagtctcatagtaaacggctactacattcgcatgtacttcgttttactgtccacgcatgttcgttgacttatttatattataatataaatattttgtttttcaatacttaattttaaaaatcccctatgaaaatggagatgagctgtatctttaaatcttattatacattgtataaaattatattgcgagatgctaaattgataatatacacttttggttgtgtatacatctcacctatctttttttgcttttttcaaataagaaagtattaaaaattaatgcctatacaacgttaaaggaggaacagacatggctaaacttgatttaaatagtcttgacgacgagcacgtaaaattcttaataaatgaattaaaatatccagaaactcatatcgatgtaaatgaataaaaacaatagttgctagtcgaataaatgaaaggcaagaaataataagtttaaagttaggaataaagtacttcttaacaataaaaagggataacatagaaaaagatagattttcaatttcaatcattttcaaagatacctatcacaccctagttagaatagatattaacggtggtactcacgataatccagatggaacaatcgctccgaaaagtcatattcacatatataatgataagtatgataaaaaggataggtttgcttatgaaattaacttgaaagatttccccgacatctataacttgtataatgtgtatatgtcgtttttagagtaaaataatataaaagaccttgaataaaggagggataatatgactacgcttgatgctaaaaaattaaaaaaagaatatcttgattggtataaccagaccttagagttttctaatttatcaaacaattttgtaagaatagataccccttttaaagataattctttagataatttaataatatacgctttatacgatcagttcagagacatgattacactgactgatgacggctatactatatttgatttagaaaataatggtatttctttaaataaatcaaaaaaacgtaaaaagatttttgaagagcacctttcagcttacggtattaaatataacgataaaactcacgaaatttttgttcaaactaactttaaaaattttaataaatcgaaacataatttattacagtgccttatatttgttaatgatatgtacttactttctaatcctaagtcacagaacatatttacagaagatgttgcaaacaaattggatgaacataacatttattacggaagagacttacctattataggaagcagtggtgttgttcataatttcgacttttttattagcgctaagaaaaatcaaaaagaaaaatttatcaatgctatttctaaccctaataattctatgattattaagtcgaaaataacggatgctatgcaagcaaaaaaaataaaaagacacaggcaaaatgagtttatttttattttaaatgactcaaaaaaagaaataaatgaacataataaaaatcttcttcatgaaaactatattagtactatagattatagcgaattagatgaaaagataggtttattgatttaatatttatagccgtgattatatcaatatttatattaaatgaaacgaatttgaaaatttcgaaacagattaagttagcaaattgcataaccttattgataatgcagaatcgtctacaaatagttaaacaaattatttgagaataattattgttaaactatatgggtaggtgattttattttgacaagagacagaagaacatatattaaagactttaaattacaaatggttaaactttatgaaaatggtaagtctagatacgaaattatacgcgaatacgatttaacactctcaatcttctcgaactgaataaataatgggtcattcaatcatcaagacaactaaatatgtgataaaaaatggtcaaatcattttgcaaatttaaatagacactctcaataaattgcagagttcaaaattaaaaatgtcaacattatagtaaactaacatagtcccctgttcatattcttcaatctttaaatcttatcgaacaaataaaagcagataattttttaatttgaacgttttattttagaacaaaaaagagcaaggttaacgagtcagaaaatctttttcttgatacgtatatgacacttgctcttttaagaatctgaatatttcacgctatttccattaaattagcggagaatgaatgatatctttatactaataaatttaactttttaacgtataaaattaatgcattgtactaaagtttcaattattttataattgtatgaatgaatcgtatacacttagttagtcaaatctaagaatttagatattgtttaattttaaaactatcgattcacatataaataaaaggagataacagcatgaggagattactcagtctattactagctagtacaatgattttagtcgcatgtgggaatgctaacaatgaaaataagaaaaaggaagacgaaaaaaaatcagaagtaaaaaaagaagctacgaaaaataatgataaaccaaagaacgaaaagaagaatcaagatataaataaaaacaataatgagcaagttcaaaatgtcaataataaacaaccagtcttaaataataatagtaatcataacaatcaacaacaaagcaataaaaataattacacagttatagaaaacgggaatacagttacagaaatttataatggacaatcacacacaactacaaataaccctattagagaagaatatgtagagggagaaacagacccgatatataaaagagagtataagcatttttatacacctgaagaagctcaaagagcacaagaaaatagcgaccaaattttaagagaaatgggtctcgaaccagaaagatatgaataaaatcaaactaaataatttcgggtagcccccctacccttattatttttttgctaagaagtaataattatatttctaatatgattaggttcgatgttaatggtagtgatcatgcaaatccaccaaataatgaaagaatacctacgccacatatacacatatatactgaagaatataataatggtggtattgcgatcccattaaaagatattgaagatttagaattaacagatgaaattatagaatcattagacttctttatgaagtatactaatataaaacacgataatgttataaaagaaccaagattactgtaaaagaaatggagggatacttagtgaagactatcgaagaaagaatgaaagaatatttcaactggttaaagcaaaattatatcttcaaagaattagatagttctacagaaattactactccctttaagaaccatttgaatgattttattagaatatatgctgatacactacctaataatgaaatttgtctatcagatgacggattgacgattaatgaattagaaatgttgggtattgatataaacacaaaaacgagaactaaacttatacaaaatattttaaatcaatttaatttaaaattagttgataaagaaattacagcggatgttaaaaatgagagttttgctcagtctaaacataatttaattcaaggcatattgaaaatttatgaccttactttaactactaaatctaacgttacaaacatattctatgaagaagtatttgaattcttatatgaccaagaaataagaggtttagcacaagtttctgtttctggagaatcaggtttaaaatattctattgattatattgtttctgaaacaaaatcacaaccagaaaaactagttaactttacaaacaacttagatttcaacaaaataactaatgaagcttatatttaccgtgatatcaaaccaaacagaccatccagaaacaaattagaacctatcatgttgataattgtaaatgatgtagatcatccgataaatgaaagagcacaaactgtagcagaacatgaaaaccttgagatattaaaatggtctaataaatcaaaaatcattgaaactttaacctcataaattagcagtagtcccttatttatattctttaatttccaaaccatatcgtgcaaatagaaaagcagataacttttttatttgcacgttttattttagaacaaaaaagaacaaggtcaaagagtcagaaaaactttttcttgatacgtatttgacacttgctcttttaagaaaactaacaattcattgtatttccgttaaattaacggagaattcggattacctcgatagatttacctctagagtgttaaaaaattgtacattcttaaacaatcataaatgtacgttattaaattatcatttccactggagaatcatgtcgactaaaagattataaaagtaaaaatacatttaaaagcacgtcattttcaaaccgccataaaacagcatttttaaaccgctattgacataaaacatatttagaataaatcatttagaaaaattaaataatttaaccggcaataaactaactatttacatgaatctataaaacacttagaacaaaagttcgaaaaacgcactttatgattgtatagtgatatcaaatatacttatcagtgagtattaagaaatacttccattttaatactcttagaatcaacaactttattatctccgtaaatatttaaaaacttatatggaacaaaaggtactagttcttttttaggaaataagtcaaaccaaaaacttgtattgttcttttcagtaaattttatatatccagattcaaatgcagaaccatcaaactcgtatagctttttttctttagtgagccagtgtcttgctttgtaatctagttcctgaatagtaaccatattcttatttgtagttattgtaaatccaagtgattgtctattgtcgattgttacctgtacagtaattaatttatctctttcattttctgaactattaaatgtaagaccaccatacatacaacaatctccaaaattttggtttatatccggttcagatttaggtattatacatgtataaaaatatggaacgccaaaaatgtctacttttttatctttataattgttagctaattctgtattttctaattcagttttaacctcattataactcttatactcaattggaaaaattaaatcatgagataaaaactgtctagaattaataactcctcttccttcaacaggtggagacgtataaagattcattacattacccatagttcccttattatttttataatcacttactttatttagttcgtctaatttaggatcgggttgagcattcacataattcatattatgaaaaactatttctagaatcaaaataataattacagtagataatttcttcataaaacctcctctaacttattcagtctatttgacaatgaaccttattataaattcacgcttatagatagttcaggttgtagtgtgtcgatagcattgttttaaaactaaaaattcactagcagaataaattaaaattctatttatcattattactaattacaacaaataattttgaatccgtattcaagataatatataaatttcaaattttactacaattcaaatcattttcctctcatataatggtttaatttcatgattcagttgataatcatcaatcacttaatctttatataaaaatacatcaatatgataattagatgagctaactgttctattatcactataaaattgaaaaaactctgctcccactgaaccttttacgttatataaatcataataaaatgattgatcttgatgattatgagaatgaaagaaaatgcatcctttttgtatgttaccggtatctttattgtatattttatataaattttctaatttaaatcgaactttagtgtctaattcttgtactgttactttagcctttttggtttttataacaaaaccttcttgttggacaccatctttaaatacattaacgcctataactctctcttcatctaattgatttccatcatgtatcgtaactcctccgtataagcatgatgttttttcttcagttaagcctacacatttatttccaaaatacagtccataaatatctatattttttcctttaaattgatttgctaaatctgatgagttaaactcaactttcaaactagaagttttaagtacggatatatcaatattttttaatattatagtattattcagtagttgatctgtactaattttatttgactcgtctaattgccacgttatatcagtataatagcttgttaaattaaataacttactactatctagatcagattttttctttaaatcttttttgtctacttcagcattaacataattattattaataagacataataaagttattataattgcagctatgtagaacaatctcataagctttttaatattttttataatattctctccctcaattattttttggttaaatgaacttctacattaatagatttactctcaactgttttattatcattataaattagtaaatatttagtcggataaaattttttaccagattcaggcatcaaatcataccaaaaagaatgaccacttccttcgataaactttatatagccagtctcataaggcgaactgttaaattcatataaatttttatgcttaagtaaatagtttctaactttataatctatttcttgtgctgttatgtttttcttattagtaggtatatcaaaagataatgaatttctctcgttttcataaactttaattaagatattatgagagttatcagttgaattatttttatctatttgatttccatcatgctcggtcacaccgccatacatacacgttttttcaattaatctaccatcatttaattccatattatccgatgaaaaatagcattgattataatagtttgtcccaaacaaatctacgtttttatttttatatttatccgaaaggcttttattattaaattctgtttttaaaattttagaaccatttattttaaataataaatcatgttgtaaaaacttttcttgggatttaatgtttgtttctgatacgtgtttatcatcatacaaatacctcatattatccattagaccagtgaattcactcgctttattcaattgttctggtttaggattgccatttaacataaatagtaagctgcaagacttaacacatatgaagataaaggcaaataacttcattacaacaactccatattttaattttttataaatttgatgtattacagggaatatttaacgtacacattagccctagagactttaaaatttaaatagttaatacatatattaatttcgtataaattcgcattttagtgttaaaactaattatcattagttactatctacatatgatatttcgacatcaagatgaaatttttcagattctattattttattatcttcataaattttcaaaaaacttacaggcagtccatctcctgtataaaacaaatcatatgaaaatgatttttcattatttaaatgaaataaaactttcccattattaaaacctgaataaaatttagatttatatccatattctttgcctttaccagtgttattatgaccatatatattgtattcttcttgaagatatcttcttaatttaacatcaatttcttgagctgttactagttttttattagttgctattttgtcagtagaaattgttttatgtttgccattaacccaaagattaatagggatttttctagcagaatttaagtattgtcctgataaagtggcccctccatacatgtatttagatttacaaggaccattataatcaatgccaaaaatatccagtttctttcctttaaatttacttatttcgtcccaattattagattctgagatcaaatcattggtacctgttgaaaattcgagttgatttgcaataggtaggtttttatctgtgacgccttttaaatctatataatcatgttttgtatagaaatttcttaagttacctacaccaatatcaccttgagcatacgtaagatctttaatgttaaaaagtaatataaaaactaatataaaactatatttaaattttttcatggcatttcctttactaagttatgattgaaatacttcaactttcgtccttataagatatttctacatctaaatggaatttttcagtttcgacagttttgttgtcattatatatttttaagaaactttcagcttgtcctgttccagtatcaaataagtcataagaaaatgatgaaccatcattcaaatgaaataatatttttcctgcattaaatccagaactaaattttgacttattaccataatttcttcctttatttgtatcattaaagccataaatattatattcttcttgtagatatcttcttaatttagtatcaatttcttgagctgttactaactttttattagttgatactttgtcagtagatatagtttgatgttctccattaacccaaagattaataggaatacgtctagatttctctaaataatcacctgctaatgtaactccaccgtatatatatttgtttttcaaacaatatccactataacttagaccatatacatctacagcatgatttttgaatttctttacatcatcaacgttcttaaattcagctgttactgtcgaattatccatagaaaaaactaattgatgcgaaagatgattattttcaggattaatactttggtggtcttcaattggatagctaccataatagttcctaagattcaaaactccgacatcagcggttgcgatatgattttgcgaatagcaaaacaataaaacaacaatgataagtattcttttcatattttatttctcctatatttaaacttctctatctttattatcttttattgtaaaaataaccaattcttcttaaatcatcatgattctatcccacttatatattattactcgttaatctggttttgttatctatactaaaatagaaagctttttatagtaataaagttagatttgaatcactattcgttcttcatcatttactaagctactttgtaaaaatatgttaatatctatagttctttataggattgtaagttgatatccatcaactttcagattgttatgtaaataaataaacatcaatatgatagtctgatgaatctattgttttattatcattataaatttgcaaatattgatctggtaaatttcctttaatataaaataaatcataataaaatgattctttatgctccgaatgagaatgaaatttaatataacctttttgtacatcactagtcattctgtcatacaatttatatgcattatttaattttgttcttactttaatatcaagttcttgtgcagtaactttctttttatctgtagtaacgataaatgtattaacatttacattatccttatacacagctactcctatatttttaggctcgcttaatttattattttcatgaggtgttaccccaccatatgtacaggcagtatccacttgatgctcaccatgacaatgtgctttatagtaaacaccataaatatcaacagtctttcctagaaattctttagaaatcgctgatgagctaaattccacttttaaatctttaaatttagcagatattccatctaaccaattaatacttttaaataataaatcgaagtctaagaatttttctgtagttgatacaattgattttactgtcgtaaatcgattatttatataatcatcattaatattatgtaaagcaatagggtctacacttgacttcttacacaaactctctattttaggatcttcttcatttgcatatgcattgtttacactacatattgcaattaaatttaaaattaataataatacatttaacattactttactatttttaataatatccctctttcacaaaatttttttcttaataaactgaaaaattctgtttttaatctttaaatattcactaatattattagattacgattttaaacttaacaatcctacttactattgaacaaacaaattttaaattaagtgactcagataatagacaaaaaaccttaaaaatagcgcttaaaatgggtaaaagcattttaagcgctataacggagagtgagggattcgaaccctcgagacgcttgtggcgcctacacactttccaggcgtgctccttcggccaactcggacaactctcctcaataataaatatgtaataaaaaaacagaagcgatatttcacttctgtttgtatgactcctacgggactcgaacccgtgttaccgccgtgaaagggcggtgtcttaaccgcttgaccaaggagccatggctccacaggtaggactcgaacctacgaccgatcggttaacagccgatagctctaccactgagctactgtggaataataatagaaaataatggagcgggtgatgggaatcgaacccacaacatcagcttggaaggctgaggttttgccattaaactacacccgctaatgtaaacgattatggggcggctgaaggggatcgaaccctcgaatgtcggaaccacaatccgatgtgttaaccacttcaccacaaccgccatgaattaagaatggttcaggacagagtcgaactgccgacacatggagcttcaatccattgctctaccaactgagctactgaaccgtaatggtaataataatggcggtctcgacgggaatcgaacccgcgatctcctgcgtgacaggcaggcgtgttaaccgctacactacgagacctattaaattaaaaactatgtattgcgggaggcggatttgaaccaccgaccttcgggttatgagcccgacgagctaccgaactgctccatcccgcgctaatattattttgaattacctaactaatataccatatttaaaaacctaaagtcaagaacttttttaatttaatttaaatattatttcttaaataattacttaaatatcgtagcaacatgttctctgttgaacacaaatattagtatattcatttttgtagtgtacgtcaacgacattttgaaagttttttgtgtaaaaaaacgcttcttcttcccttttataatataagtgtctaatagttgtcataattactcatgaactattgaaaaagatgtaggaatcataaattttataatgcctacacctctaaactattaaaatataattataatctttttcactaaagtgctatgctacctactgacacaacataacacaacaatacattacctatcgtgtcatgtaatcttgcatccgatcttgcaacgctgtaaatgtttcgaagccatcctcttctaagaagtgccctccatcttccacgattcgcaagttcccctctaatgcattcattaaacgctgggtctctttatatgaaacgtatttgtcatttttagaactcaatccataaaaattgtcaactttctttttaatattatcgtaatcaatggttacattacttaaatcaatatctaaatctatattttctgcatcttctttaaagcccgctatactaaaaaagccttcaatcggctgatcaatcatttcaatatattttaaagctgtgattgaacctaaaccatgtgttacaaaatatgtatcctttttgcgtacattaatttgtttcgtcatagcttcaatccactgatccactgtcttcgcttcaggggattcaaaattaaataatgttacgtcatatccttctaaagttaagttatgctccaaccactgataccaatgatttctactatttccatgcatagaatgtacaataattacatctgtcatctcattctctcctttcaacttactacttcttttctatttttaaaaaaatgactgattacctataattgtaaaataaaaacaccttaattagaaatgttatatcgcaaagtgacatttctaattaaagtgtattgtcatcatttcaatatcattcaaaaacagctaaacctttgtctctgcttcaatttcacaaaaataattcccgctgaaagtatctatatttacacactacttctaccatcatataacttaaaatgactatatttcatcaaacattatctaaaggcgtcgcacctacaccacaccatccaacaattaacttacaactctgcgattacttcttcagcagcaactttaccttgcgtaatacaatcaggtagtccaaccgcttcaaaagatgcaccagttactctaagtcgtggatatgtttgtttaatatgtgcttgaatctgtctaatttgttgaatatgaccgacatggtactgtggcatacttttcggcaaacgattgacaattgtaaattcaggatcacctttaaatgtcatcatttgacttaaatctctacgtacaatcgatactaattcattatctgtatgatcatcaaccacagtatcacctggtttacctacatacgcacgaatcaaaaccttaccttctggtgtagtaaatggccattttttcgatgtccaagtacaagctgtaatgtctgtatcacttgttcttgctataacgaatccagtaccatcataagtattttcaatatccttttcatcaaatgctaatactacagtggcaaccgttgtactatccattgttttaaaataatcaaaagctggatcttgaccaaaccaatttaaaaacacttgatgtggtgtcgttactaatacgccatcatacacttcttctagttgatcactgtaaacaattttatattgcttttgagatgtaataatatcatctactgtcgtattatattgaattgatacaccctttttaataacatcttgttctaatgcttcaataaatgaacttaaaccatgcttaaattgtttgaattgtccttttggtgcgccaggatataattgtctttgtttcagacgcttatttttctcatccttcataccttttatcagacttccgaatgcctcttctttttctttaaaattaggaaacgtactcatcaaacttaatttatcaatatcggtaccataaataccacccattaaaggctctattaaattctcaagtacctcattacctaatcttgctctgaaaaatgccccaacagaaatgtcaccatcctgcatttgagtaggttttttaagtaaatctaaccctgctcttaatttaccaagtggtgaaattaatttagttgtcacaaacggtttgatatctgtcggaattcccataattgatccacctggaataggatacaatttgtttttcgcaaaaatataagattgtccagtcgtatttgtaacaatatcttgttctaatccaatatctttcgctaattctgtcatgattgtttttctacctaaataagattcaggccctagttcaatcatataaccatctttacgatacgattgaatctttccccccggacgattcgatgcttcaaagatggttacatcaatattaggatcttgctgttttaaaaaatatgcacttgataaacctgttatccccgctcctataatagccactgatttagtcacaacgtttcacgcttctttcgtcattaaaatatagacttgatttcatcaacaattgcaccgataaataatggatgtgtattcggcatttttggacgataataattcgcaccaatatcatcgcaaacaactttacattcataatcattgtcataaagcacctctaaatgctcacatacaaaacctactggcgtatatataaagtttttatactgatgtttttcatataaatcacgtgttaaatcttgtacatctggccctaaccaaggtgtacctgtattaccttcagattgccaaccaatcgcgatatgttcaatattagattgttctttaattaaaagtgcagtatgttctagttcttgtggatatggatcattattcttttcgattaaaccttttggcaaactatgtgccgaaacaactaataccgtgtctttatgttcctcttccggtatttgagctaatgtttcgttgactttattcgtccaatattcaataaatttaggttgttcataataatgtttcacatgtgtaagttgaataccatattttgcagcttcttcatcagcacgtttgtcatatgatcctactgaaaatgaagaataatgtggtgctagtactaccgtgattgcttcagtaatgccatcattgtgcatttgttcaaccgcatcttcgataaatggtgaaatgtgttttaatcctaagtatagtttaaattcaacatctgcatatgctttatttaatgctgaaactagcgcatcagcctggtcatctgttgtacctgctaatggtgataaaccacctataaattcatatctatctttcaaatcttgaagttcttcttcagatggacgtttaccatgtctaatatctgtataatatggctctatgtcactttctttataaggtgtgccataagccataactaataatcccatttttttagtcattgataataccttcctttaaatgaattatctttcatgtgcttcaatgtaaaactatgattatctttgtgtatatgtgtgtacgaattcgcttactttacgtaacgtctctggttgcacttctgggaatacaccgtgtcctaaattaaagatgtgtttaccgttctccataccttgatctaatattggtttcaatctctcttcaatgacattccatggtgctaataaaattgatggatctaaattcccttgtaatgttttagtaacgcctaattgttgagcctgattaatagacgttctccaatctaggcctaatacatcaatcggtaaatcattccattcattgattaaatgactggcacctacaccgaataaaattaccggcacatcatgtttttctttaacctcactgattaatcgaatcatatgtggtttaatgtaacgtctgtaatcctcgacatttaatgcacctacccatgaatcgaaaatttgaatcaattcggcacctgcttcgacttgagctgttacatatttaacagatacatcaactaaatgattcattaaagcaaaccatgttgcttcatctctatacatcatcgcttttgtaaaattgtaatttttcgatggtccgccttcaatcatatatgacgctaatgtaaatggtgccccagtaaatcctattagcggcacatttaacttttcttctgttaaaagtttaattgtatctaatacatatggtacatctcgttcggggtctatttgagaaagtttctcaacatcttgaattgttttgattggattatgaatcactggaccaatacccgatttaatttctacatcgacaccaattggctttaatggtgtcataatatctttgtataaaattgctgcatctgtatgataattatcaactggtaaatgtgttacataagcgcacaactccggctgatgtgtaatatcgaatagtgaatatttttctttcaattttcgatattctggttgcgaacggccagcttgtcgcataaaccaaacaggtgtatgtgatgtttcttcacctttgatcatttttaaaattgtattgtttttattatgcaccataaaggcctcctaaattaaaatcattcttatctatattatcatatcgctcattcgttcgtattttcaataaataaatgtcataaaactgacatttaatcatagaactatttattgtaaatttaaattctaaagtccattattttgtatcattacttctaaatatctcgcaagattcattatagtaattttaatcaattattaatagtggtaatgactagtttatcatcgtataataaataaaaacataagggggacctttcatatgaagaaactatatacatcttatggcacttatggatttttacatcagataaaaatcaataacccgacccatcaactattccaattttcagcatcagatacttcagttatttttgaagaaactgatggtgagactgttttaaaatcaccttcaatatatgaagttattaaagaaattggtgaattcagtgaacatcatttctattgtgcaatcttcattccatcaacagaagatcatgcatatcaacttgaaaagaaactgattagtgtagacgataatttcagaaactttggtggctttaaaagctatcgtttgttaagacctgctaaaggtacaacatacaaaatttatttcggatttgctgatcgacatgcatacgaagactttaagcaatctgatgcctttaatgaccatttttcaaaagacgcattaagtcattactttggttcaagcggacaacattcaagttattttgaaagatatctatacccaataaaagaatagattcgaagaaaacttccattggttatgctgttaacgtatagatgctaatgtaatctgaacgccgtatcatttggcgttcaacattacatgcacctttacaacatacatgccaatggaagttttttagtctcgtaataatgtttcctgatatttcaactttttaataatacttctaatcgttaataaacctacaatatagaaaatgagtacaacatagaataacgtcatatgttttataataaatgtcactgcaaacacagtacaaataacaaacattaatctatataaaaactgttcataccctttgattaccttctcttcaggtacaggccacacttgaggccataagccatatgcttgctgtgaataaaattgtgccatttgtaacaatataatatatacaaataaacacccaataattgctgtcactaatggatatgataaccaaaccattaataaaactgcaataattactaacctaaagataatattaaatgcgtctctccctcttataaagcttctaataaataagaataaatacatcgcattagagttaaatttactaccctttggaactggtaaaagtatatctagataacttcttctgactgcagattctttcaaatgttttacatcggtgaacatattaacaaatttataataattcatatgatgtcgatgttcgattgcaatcattttctcccaaggatacaaaaagcctggtttatattttttaactaaaaattctattaacacaggcaaagcaaccatcacaaatgcgatgtaccattttggagctaatagtaagtaatatgttagagcaaaggtgatgaatgatattaaattaacttgccatgttttaagtcccgattgataccattgccatcttaagcgtaaaccaacatatggaaaaattaatgcactgactccaaaacaaatataaaatgccacattatgttgattaatattgtaaaacaacgggaacattacaataacaataatgagttggattaatatgcgcgcaaagtaactatataaaatcgcatgacgcataaattgagacatgtgtttttcaaatggtaataaaaagattttatccgcttcttttaggagtggtcgcattggaaaaatggatgtcaatgctacaatcactgctgctattaatgaaaaattgatattcgttggaatatgttttaaccattcaccatatccaaaaataaatgcacccagcaaaataagtaaaaagaccatgaaatgaccattaaatataaacttattataataatttttctctttacgaagggcatgtaatcttttattaaataatgtggtcgcttggttatgcatgtacatctccaccttgcgtcacatgaatatatatatcgtctaatgtttgtttatgtaagccagtttgttgtctcaatgcttctaaatctccaaatgcaacgacttcaccttcgtctagtatgataaaacgatcacaataacgttcagctgttgctaaaatatgtgtactcattagaacggttctaccttcgtttttcttttcaaccattaaatctaacatggattgaattcctaatggatctaggccaaggaatggttcgtctataatatacaattcgggattaacgataaacgcacaaataatcatgactttttgtttcatccccttagaaaaatgactcggaaaaactttcaattcattttctaaacggaatgtctttaataatggcattgctcgattcatcgcttcatcacgatcaatatcatatgccattgctgtcatctcaatgtgttcctctaatgtgagttcttcataaataaccggtgattccggaatataagataactttcttctataagcctctatgtcatcattaatgttgatatctgaaattgatagagatccttccataggtgtaagcaatcctagcatatgtttaatcgttgtactcttaccagcgccattaaggccaataagtccaacaatttcgcctttgtttaattcaaaatttatatctttaattacagggcgttttccatatccacctgtaaactgttctactttaactgtcataaggcacctccatgacttatattgtaccaaaaattataaaatgctcatattaaatacacatgtcctaatatcgaatttttagcgacaatgttataatgaatggtaatacaagttgaaaaggagtgtagtcatcatgtcagaaacaattttcggcaaaattttaactggagaaattcctagctttaaagtatatgaagacgattatgtctatgcctttttagatatatcacaagttactaaaggacatacgttattaattcctaaaaaagcttctgctaatatctttgaaactgatgaagaaacaatgaaacatatcggtgcagcattacctaaagtagcaaatgctattaagcgtgcatttaatcctgatggtttaaacattattcaaaataatggtgagtttgcagatcaatctgtatttcatattcatttccacttaattcctcgatatgaaaatgatattgatggatttggttataagtgggaaacacatgaagacattttagataacgatgcaaaacaacaaattgctgaacaaattcaagcacaattttaaatgtatgcttaatctaagctcgaacgggtataatatgattaatattataacaattgcgtttgaagtgataacatcaaggttagtaattttaaacaaaatgagttatcaagataacagatgttaaaagtgaggagaatataaatgaaagcatcacgcattctattcggtatcggtgttggtgtagcagctggttttgtagttgcacttcaaggacgagacgacaaaagtgtcaagaacaacacgatcgatcgtactgcccctactggttcaaaatcagaactacaacgtgaatttgaaacgattaaacaaagttttaatgacattttaaactatggtgttcaaattaaaaacgaaagtgcggaatttggtagttcaattggtggtgaaattaagtcattacttggaaacttcaaatctgacatcaatcctaatattgaacgtttacagtcacacatcgaaaatttacaaaatcgtggcgaggatattggaaacgaaatttctaagtagcaggttacgttctcgatcacaactatttttattagtaactgcatatttattttttaaatttaaatgccaaataaacgagatgacattagaaattagatatttcttgtcatctcttttttaaaactcaaatgaacttatgtttacaaattataggaagacattgtttgtagtgattttcgcttaaatcctatttatgaattgatcgaaaacattgcttaggattcattatgttatccttgcactttgattacgctttacttaaatcattatcgacaaacaacatacttatattttcattgagccaaaccttatatacacattacatataccttacttgcacaaattattaatctggtgtttattataattacatatcactatatttttagcatttgtataacttagttggtcaaaagatgcttttgcatatgccctgccatatccattttttatattattcaagttttcaaatactcatgtcacacgcgcctttttcataagtgatgctttattagcaagaatatgtgttcgcagaaatttgttctgcatcctacttctacgctagtcaatcagacaattttaccaatccccactttcgcgtttcaaatcaaacaatacgtcgctcctttcttcttatataacaattcttctaacatgatatgttactattgaattactgaacctgagttagttataatctaacttatattgaaaagagatgaggcgtaagatatgtttttatgtaaaagacaaattgatatcaatgcacgatttggtttgcctagaattgcatttatgagtgcagttgcaaccatcattatgtttttagttagttatgaagtaatgtattttttatctaatacgccattatcagatagacattttctcatctttttattacttgtatttatgacgtatccattacataaaagtatacatttattatttttcttaccatatagaaaatcgtttaaagttcataagttaactaaaagaaaatggcttatattctataatacctacgtcaatcaacctgtacacaaattttatttttgcattaacttaatattgccgttaattatcttatctgcaatgttcgtttatctaacaatttcattcccgcaatatggacattattttatgttcttattggcattgaatttcggtatttccattacagatttattatatttaaaaataattatattttctaattatggacaatatatagaagaacatagtacaggtattaatattttgaaaaaaattaaaaatccatatcatttataacaaaataattatagcaaggtgttattatttgtttttaggctatgtaatagcttacaatcaaatgtatatagaccttgtttttttattttcatcaatttctacccctaaacctaatgctctagtctgatgtcatgggttattgattggtgataatataaaactatgttatattcacgatgattaacttacaaaggagtttcaactatgaagatgataaacaaattaatcgttccggtaacagctagtgctttattattaggcgcttgtggcgctagtgccacagactctaaagaaaatacattaatttcttctaaagctggagatgtaacagttgcagatacaatgaaaaaaatcggtaaagatcaaattgcaaatgcatcgtttactgaaatgttaaataaaattttagctgataaatataaaaataaagttaatgataagaagattgatgaacaaattgaaaaaatgcaaaagcaatacggcggtaaagataaatttgaaaaggcccttcaacagcaaggtttaacagccgataaatataaagaaaatttacgtactgctgcttatcataaagaattactatcagataaaattaaaatctctgattctgaaattaaagaagacagcaagaaagcttcacacattttaattaaagttaaatctaagaaaagcgacaaagaaggcttagatgataaagaagcgaaacaaaaagctgaagaaattcaaaaagaagtttcaaaagatccaagtaaatttggtgaaatcgctaaaaaagaatcaatggatactggttcagctaaaaaagatggcgaattaggttatgttcttaaaggacaaactgataaagattttgaaaaagcactatttaagcttaaagatggtgaagtatcagaggttgttaaatcaagctttggatatcatgttattaaagctgataaaccaacagactttaacagtgaaaaacaaagcctgaaagaaaaattagtcgatcagaaagtacaaaaaaatccaaaattattaactgatgcatacaaagatctattaaaagaatacgatgttgactttaaagatcgtgatattaaatcagttgtcgaagataaaatcttaaaccctgaaaaacttaaacaaggtggcgcacaaggcggacaatccggcatgagccaataacacaaaaccgagcgaccgtggttcaaaaatcataccacggccgctcggttttttcgcattaaaaatcggacagatgagctcatgtttcagtatactcatctgtccgatatcttttaattcttaatcgagtgattcaggattgtagaatctacgattttcaagaccaaatattttatctgtaaactgacccttgtcagtttttttatatgccttttcaaacatattcattctagcatcgatattatcgatatagcataaaatttctgcttcttttaagtatggcagttttggcgaaccatactctaacttaccatgatgagataaaatcatatgtcttaacaacatgatttcttctccttcaatgttcaattcacgagctgcttcaactacttcatcactcgcaatcgagatgtgtcctaataagttaccttcgactgtatacgacgtcgcaacaggaccactcaattctctaactttaccaatatcatgcaaaataataccactatataacaaacttttgtttaacaatggataaatgtcacaaattgattttgcaatacgtaacatcgttaatacatgatagcttaagccactcgcaaagttatgatgatgagaactagcagctggatatgtgtaaaatcgttcttgatattttttcaataaatgacgtgtgatacgttgtaaattagcattttcaatatctagcaaataatgagaaatctcttcttgtatttctgccggtgataaaggtgcaccatctacaaattgttctgtttttaattgatcttcagttgtcgctagtctaatttggttgactttcatctgtttatttccgcgatagtttatgatgtcacctttaacatgtacaatttcttcaggcttgattgttgccatatcattttttgtagccgtccaaaatttcgcttcaatttcaccacttttatcttgcaaatgtaatgtcatataatctttaccttgtgctgttacaccctgtgtagctttatgcactaagaaaaagtgatcaactgaatctccgggatttagattctctatatttctcatcgtttcccgccttcctctattttgtttaatgtaatcacttcttttgatggaacaatattatcttttacacatgtaaagtatagtacttgatagtgttctgataatgatcgtaaataattcaacattttttcagtacgttttttatcaaaatgaacaaatgcatcatcaacaattaatgggaacggataatatggtcttagtaccttaattaaactgatacgtaaagctacataaagtaattcttttgtagattgacttagttcaacaggatcatataattgaccattaacatgtttaaccgtaattgaatcttcattatagttaatcatcgtatatctgccatctgttaaatgcttcaatatttctaccgcttcattaataacttgaggcaaacgtttatctttaatttgtttaatgtgttcatcaactaaactttgtaaataacttaaacttgcccaatcttttgcgatatcattaagttgatttttaagactgtgatattcatgtcttaaattagcaagcgttgtatcagtttccatgtgattgatttgtgcacttaaatcactgacttgtgcttgcatttcaagatattgctcattatattcgtcaacttgagtagccaataaatgatcttcttcttcaagttgtgcagttgttttttcacttaaactagaacttaattcataagaatagttttggttctcaagatatttagttaaatcattaaaacgactcaaattactagtataagtttggtaatcttcatgatgttggtaaaaatcttcttcagtaccaacattgataaaatcgaatagtgctgtaatttctttattattttcttctaattgagcatttaaatgatttaattcatttgtaacaagtttggtattttcagcattaatacgccatttttcattcgtgtcttcagctgatttcaaccattgttgcacatcgtggaataaagataatttgttgaaataaacaaattgtgattttgtaacagcttcagcatgattgtagaatgtatctaattcttgaaccaattgctggcgttgttgatttaaatcactgatatgttgatctaatgctttaatattcgccattgtagaaatactatcaacaattaaatcatttgaaattttagatgataagtataattcatccttaacgttctcaactgtcgattgtaattcatcatgacgccctttcgcatcatttaaacgaccttcaatatactgacgtttctcttctaaaatatctttatttttcaaagcttgttgccagtaatcacgaatgcgatattgctcatcaagatcaaaatctaagtcatagttttcatctaaaatggctaattgtgctttaatttcttcgatttcatctgtgatggcctcgctataatctacttcttttgatttagacatgatgataccgataacaaatactaaagttaatactgcgaaaataataccaaacaacacgttgtttgaaataaatgagaaagcagttaaaccaatacctactaatgttaaaagaataaacgttgttcgtaacaatttttgacgtttttgtttttcttgttgctcaatttcgaaacgttctttcaatttgctatacaagttctctttttcgtttaattcaatgacttgttgtgagtattcttttttcttttcaaaagtctcttcaggaactattttttcttcaacagaatctagttcgctatgaaccgcattatcttcgattttattttcttctaaactacgttctaattgtttaatgtatgcagcttgttcttgtttattcttgatttgctcactgacataacttttcattgcctcagagctatctacgtcatgatgcgtttcagaccaaccaatatttgcttgcaattcatctttatcacgttgtttattcgcaatatccttttcgattgcagtaagttcaaattctttatttttaatttcattttcttgttgattcaaactaatgaaggcgtcaatatcagattgtttaactggctctaattgagtcgcttcttctttaagttgagctaaacgctcatttcttaaaccaatatctctttctaacgattgcttatgcgctcgtgctttttcgtaacgatccacacctttttctgggaatgtgattggctcaatatttaactgttgttctagagacttccattcttgtgaatgatcatgtaaagcaacctctttttgtttttcttcatgcatttttgataattgatttaaattatgctttaaattctctaatcgacgtgatgatttatctcgatcatctactaagcgatgatatgtttctagctttgcttcttcttcacgaatttgactttctagttgttttaattgctcaatttgttgattaatgatcggatttttacctgattttttatataattcatcttttttacgattaatcacttcgcgcattgacgtgaattcagttgatcctaaagcccctgcttgtaataaataatcttgcaattgtttttcatttagatttctatgaatgtcttgaagccctagtacatcaaatgaaaagataccttgatatgtctttttagaaatataattaagtttcttttgtaaccaagcatcatcacgcacagcaccattaggtaaatatactttcacatcaccttgagcactgcctttaattcgttcaacttcaatctctaagccatcatcaagaataagtactaatttaccaccgtattggttacctagacgtggttctagtcttggctctttagactttttagttggaaaaccaaataatatcgaatggatgaatgcttgaatcgtcgatttacccgcttcattttcaccaaaaatttcagtgaagtttttattaaattcaattttacgttgaacaaattgaccgtaaccataaatttcaagtgatttaattatcattttgttcacctctcatttcagcttttaatatttcttcagcacgattaactaatgctgtatggtcgaatgttccataatcgtctaggaacttagatgcccttggatttaaatataaatctgacatcgctttatcaaaaacagtttgatcgactaataattccgctgaaaattcattaactaaaggtgactcatcattttgtgcatattgtacttttaactcatcaatatatacaaattgattttcgttttcttcataatctgtaatcatttcttcaacttgtaataaatcttgaggtgaaattaatgtctcactattaataacaagcgttaaacgataaaaggcctttccttcttctctcacttgttctttaaagttttgaatgacctcgtataaaccttgcttagatgtcttatccgtttcaatagttgcttcttcaaatctaatatactgtgtaggataaaatttagtctttaattttaagtggtcaccctcgattaataagcaacctttttcaccttgctcattaaaatgtctaccttgaatattacctgaatagttaattacaggcatatcacttaattgttgacgttcatgtatatgacctaaagcccaataatgatacaatttactgtttaaatcttctaaaatgaactcggtatatctttcgttaactgaagatttactatacgtaccatgcaagacaccaatatgtatgcctttttggccttgacttgatggatattcatcaatcttgttctcataacttgctctattttcataactaaatccgtgaatataaattgtttcaccagatttagtaattgcttcatacgtctcaactttatttgaaaatacagaaacattatctggccagtttgatgaaatctttgatgataatgggtcgtgattaccatgacaaacataaacaaagatttgttcattttgtaaacgttcaaattgctgttttaagaaaatttcagcacgtaatgttctgttttcactatcaaataaatcacccgcgataattacaaaatcaacatcttgttgtaatgcaatatctacaatgtttttaaaactttcataagcacttttttgaacatcctcaaaaattttagggcttatatgacccttagatttgaaaggactatctaaatgtaaatccgaacaatgaataaatttaaccatacatccatatctccttaattaaaggttctaacatcaattttgcaaaatccaactatacaaagcattctaatcactatattcatacttataggtgtagtgattcattagctgatttattaaaaccagtcgccatttttatttcgttaaaaaattattatctacacaataataaagtgctttagtcaaatcgtgatgttttatttattaacaagtttattatttcttcattttaccataatacgcttcatatcgtcgatgaacatatgaaattgagacacatttataacagtttaaaattttatttgtagcgtgcgttgatttttttcaaaaatttcagtcggaaatgcaatttccgtaattgttaacaccgctagtgaaccaactgacacattaaagatttacatgattactctactagatttgctcggcagtaatgaccaattagaaactaaatgtcaaaactatcattgcactaaatacgccaaacattttcaggccgttcttaatgagtcattaaaagtgaaacgcttttccatcagtccgatacatgaccgaactaatagtattatgttgaaaactttacacttcaaaatgcaaaaaggaagttaggacacgtttactagcctaacttccgttatcaagctcatctgcccgttttggcatagagctagccatgtttgattgcccagcttccgtcgtccattttgagctaaagctaggacatgtttagtagcctaaattccgatactgaacgcatctgcccaatttgacagagagcctctaacttccgttatcaaaactaaaaaaactacccacaaagtctcggactctgtcggcagtctattcctctatttaaaggattgaaaaatattattttaatattagtcagcgtaaatttcgtctaatggtttaacgataatttggttgatttcttggaatacttgactcattttttgttcagcattcattaatgcagagatgttttcatctttttcaattgcttgcgcttgttcttgcgctttttgtaaatcttcttcagcaatttcttcaccttgcatttgtttttgttggaagttaatttgagtttcacggaactcgtcgaataactttttagattcttcgttagcttttacattagcgaatgcttctttgattgctttgtattcttcgctttctcttaaagcttgttctaattgatttgcataatcatataaatttactgccatggttatagcactcctttgttgtgatgtttattaaaacgttcgatattactttaccacatctcgcttttttagacaaagattgcaaccaaaccttggaaaaatccaataataccacctaaaatgaaacctaatgacataatcaactttagttctttgttagcaatttctataattaatttttcaatataatctaagtcaaacgtattaatttgttcttcaattaatcctcgtaaatccacttttttcataattgtagataagtgaatcgataattgttcaatgattaaatttgctaatttgctagagagttgaccttctaaataatcaacgaattgaggcattaacgtaaccactggcttattcgcttgtttgcttgcatatgttgttatatacactgatagattttcagcgatttcattaaactgagacgcatctaacagttcattcaatggtttatctttaaaagtttgatattcattggtaattaacgatgtcacaattgttcttgctttaggatgagatgttaaacgtataagttcttgttgaatgcgatctgcaatgctctcttttgtcataaacatttgcaacataccaattaacttacctttctcattgaaaaaagtatccaacatatcattaatatcttgtgtgccttttgcagatgataaataattccttgcacgatcacataataagtctgttgcgttatctacatgctgatctaaaaatgttacaagttgatttggcaataaagatgctattgtttggttttgatgctttgtataataattattcaattgtgattcaatatattgatttccattagtttgtaatacttgttctaaatcaatatcgatttgagaagtaatttgttttattgacaattgatctttcgtcaacttttgtaactgctgttgaatcatagattctattgcttgctgtgattgctcgctttttaatttttcattaattaaagtttctgtaagcaaatgctcttcaatcacttggccaattttagttgcaatttcttcgcgtcttttcggtattaaacctggtgtaaatgggactctaaatttaaatatatagtatggtttaaaggggtgaaacagcattctaattgcaattacattagtaatgcccccaattatcgcccctactacaatcataaatatgataataaatagtgcattcataattttgactcctttgtgacaacatagttattcattataccactatttttattttttaattcattaatcatttcactttctgctcaatttattattagtttacatacaaaaagcgatgcctcacctctcgaaacaggtgtgttacatcgcttttattatttattaaaagtatataggcctagatatgtactaattcttctttagcatttctgttaaagtatgtttcagcttctctcattttagaagtaccgaaaattggttggttatctggatttaatacacgataaatattgcttactttgttactttgtaaaatgtacccattacgagtctcaatgttattccaataaatatcacttgttggtgcatggtttggatatgcacagtgatttcttgaaattgtttgaacgatttctaatggatcacagccaaatgtactgtttaatacttcagagtctctgaataatgcacaaattgaaatacaagttgtccagtttggtaatactctctctttttcgatttgtactaaagtctttttagaaagtccaattgtttgcgccatagtatcttgcgtataaccagcctctatacgaaccattttaaattttgtttgaattaaatctgtaaaactctgtctatccattctgttatctacctttctgtttggggaattttatccggacacaagaaattgcaataatacacatttcttgaaacacagattacatcttaatatatttttaataaaatgaaaagagtcaatttcacatttgtattaaattttgatcaagtcaacaagagttaagtttactttataatgaagcgaaagtaaatgaagtaaaattttatgcacaatcactagatttgataaaacttacacttttataatgatatcaaatttacaaagaaaactgtataataaaccctatcgctataaaaaattcatcaaaatcagattaaaaattgtctatttttcgacaaatatttaaaagctcattctaaatcaacttattttccattgcataaattgctgcttgtgtacgatcgctaacttgtaatttactaaatatatgactgacatgtgttttaattgttttttcagatacaaataaagtttctgcaatctctttatttgttttacctttaaccatttcacgtaacacttcaatttctctctttgacaacttattcgtgtagtgtggtttttggctaactgtttcgaatacatcttgtgccttaggatgtatcattttttcaccgttcataactcgtctaatagtttcaattaattgctgaggctcaacgtctttcatttcataaccatcagcacctttattgattgctgaaattacatgttcatcatcaacataacttgttaataccaaaactttaatatccggataatgtgccttaatatattccgtaatttcaataccattcatgccaggcatcactaaatctaatagcacaatatcagggtgctcatgctcttttaaatattctaaaaatgtttctccatctgcaaagtcttgtaaaacttctatgttttcaatcgtggataataaaaatcgcaatccttgtcgcacaatataatggtcatctactaatattactttgttcatgggttatctccttaaatcaagctattttataggaattgtgaattgtatttgtgtaccctttgttggctgagaatgaaaggtcactctacctcttaataatttaactctttgttttatgttattaataccgtgtgatgaagctatctgaacattatcgatctcaaatccttgaccataatcaatcacgtcaatatatagtatatcgttcatttgttttaatgtaagatccattttattcgtatcagcatgtttcttaacattattaatacactcttgtaatgctctatatatgttttcttcgatttcattagataaatcgattaaaccttctacatttacatttaattgtatatgcattaatttactatatgctgtcaaagcatgaattaaaccttgctcaagtccaactggcttaagttgccaaatcaatgcacgcatttcattaacggcattttgactcgtttcctcaatcgtcttgaatgcttgtttagcgatggattcgtttgacatgccatacgcagcatgtgctgttagttttacagaaaataacatttgatttactgaatcatgtaaatctctagctaaacgattacgttcattaatttttgctgcttctttttcacggtctgttaaataaatacgtttgatggctgaccctaattgaaatgcgacagactctagcaactctaaatcttcatcactatatatttcagtatttggggacgctacatttaaaatgccgaattgttcttgacccgatttaagtggtaccgttgcatgatgtgtaatattgtcattttggctaggaaatgctttagaggctaagttaatacgagaacaattgacgatattcgacgctttcattagcctacgttgattaaatgctttcacacaccaacaagacccatctttaatatagtgacagtggtctgctgtcaaagattgtggtagagccacatgtgatacaagttcatgttcacctacgctattgatgaaaaatatccagcctgtcgtgaaattactgccctcaattaaatatttcaacgcaccttgggtcatgctatacatttcagtttcttcgtttaaaaattcggcaatctcttttaataaagctagtcgcgtcctttgttccatcaaatcgctccaattcatttttacgtgtattaactattatacattgagttattatatttttaaatcttagacgtgaacatgataaaatggccttgattactcaatagttatatttaggagaactgatttgtgatatgatattaaagactataggaggattttatgaaatttaaaataccagaaaactttaatgacttaagtttacgagatattttccaacaacttaaggtacctaaaaaagatttacatcatttaaatatgtctaaagatattactattaatgataaacctgcgcgattaatggataaagtgcatactggcgacgatgtatttgttccaaccatcgatgaaaaaagtaattatgttccaagttatcgttatgcacaaattaaatacgaagacgatgatatggcaatcgtaatgaaacctaaaggtgttaagactcaccctaatgatttaaaagaaagcaatactttaatgaatcatgtgatttacactattgatagtgactatgtcgaaccaattcatcgactggaccaggaaacagtaggattattaattgttgctaaaaatcctttaatgaaaaaaattcttgatcgcatgttagaagacaatgatattacgcggatatacaaagcaaatgttaaggcacttttacctttaaaaccacaaacgattgatatgccaattggtaaagataaattccattcgaataaacgacgtgtgtctcctactggacagcgtgcaattacacacattttaacttcaaaaatgataaaagaagctgtgtgccaacttgaaatcaagttggatactggacgtactcatcaaattcgtgtgcatttagctgaaattggtcaccctgttattggtgatcctttatatggtgattcaacgttaagacaattagaacttgaaagttacaaaatagagtttgtgcatcccttgactaaggaagtcatttccgtttctttggatgactaatttgattagttttgcatgatatttaaacatgcaataccgcattgtaactaaatcaagtatcaacttaaatcggatagatggaaaattattaattttttcagatgttcggtttttttgttttttacgatgcttaggattttatattttgatattttagcaattattcattttataacatccttggataatgacttgtagtctttttcaactgcgttacgtgtatctatggacaatacatgacatcataagatttttatcacaggttgtttggccaatacatgtacaacaattcatcatataaaaaataggttctataataaaacggactccatgaaaagtttttccttttcatggctctatatcaaatcggacttataagttcaatttgacatagacaaaaaataaagcttgaacactataatgcccaaactttattttatattaatatttaattaatgaggatctaccatatcttctggtttaatccatgcttcaaattgttcttctgtaacatatccagtttgaattgcagattcttttaaagttaaaccttctttatgggctttcttagcaatttgagctgctttttcataaccaatatgtggatttaatgcagtaactaacattaatgattgatttaaataattatcaatattctcttcgattggctcaatgcccactgcacaattgttattaaatgtttccataccatcagctaaaaggtaaattgattgtagtgtattatgcataataactggtttataaacattcaattcaaagttaccttgtgaacttgcgaagccaacaactgtatcattacccattacttggactgcaaccattgttaacatttcacattgtgtaggattaactttaccaggcataattgatgaacctggttcattttcagggatggaaatttctgccaaaccagctcgtggacctgaagccaaccatctcacatcattagcaattttcattaaatctccagctaatgccttcaatgttccgtgcaattgaacaacttcatcatgcgctgtaagtgcgtggaatttattttcagaagatacaaatggataacccgtattttctgaaatataatgtgccaccttatcaccaaattcaggatgcgcattaataccagtaccaacagccgtaccaccgatggcaagatttaaaatgtgcttcttagattcagataacattatttcgcaacggtcaagcatataacgccagccactaatctcttgtcctagtttgatcggcgttgcatcttgtaaatgtgtacgaccaattttaataattgaatcaaatttgtcttctttttctttcaaagtatttcttaaaagttttaatgcaggttctaattttgtttcaacctcttgatataatgcaacgtgcatagcagttgggaatgtatcattcgaactttgtgatttatttacatcatcatttgggtggatactttcatcactttgatgatcttttaaatacatattagcaacataacttactacttcgttcacattcatattactttgtgtaccgcttcctgtttgccatacaactagtgggaagtgttcatctaattcacctgataaaatttgatcacatgcgtatacaatggcatctttctttgcctcgcttaattttcctaaatcaaaattagctaatgctgctgcacgctttagttgtgcaaaaccataaactacttcgattggcatacgctctttaccaactgggaaattgcgtttacttctttctgtttgagcaccccaatatttatctgcaggtacttctatttctccaaaagtatcatgttcaattcttactgacattcaatttctccccttatcactgtttatttaactgtagtatatcattaaataatttaattgagcaatttatgattaaaacgttttcataatttgaaataaaaatacactaatcgcacgtgttcaccctttattacagtgatacggtcatacgattagtgtgttatctatcattatttagttattgttgaactaagtttaattacgatactttgttttagtagcttcaaccgtagcaatagctgtaagtatatataatacagcactaacaattgtcgtatatggatttagagcaacaagcgtacctaatactcctgttaaactcgcataaaacccatcaagtgtataatacaatattcctgttattaataaacaacaaattacacttattacaatacctgattgattacttttaatgaatgtttgcgcattaacatcatcgattaatccttttgataaattgagttgtaattttattactttgaaaataacaggtaaatataatgccccaattgccaatggaaaagctttaattgatattaaacttataataactgttgctatcaataattgaatccagtattttcctaacataaatatataaatctcctctaatttcattcttcaatagcatatcataatcttggcatattaagaaacgcggtttaatgatttcattaaaaatattactgatagatgacttctttcaattatgtctggagtaattaattatcaattccgtttaaatggtgttttaatatttaaaattgaacttttgatatattactatgtctagtacacaaatcaatgttttatgctttacaaagttatattggcagtagttgactgcagtccacaacatagaggcttcggaatgtcagcttaaaataacgtgcaagttggcggggccacaacatagtggaattggattcccaatttctacagacattgcaagttggcgaggccacaacatagaaaaattggatcctcaatttctacaaacattgcaaattagggaaacgggacacaaactcagaagttggtggaaagtcagcttaaaataacatgcaagttggcggggccacaacatagaaaaattggatcctcaatttctacaaacaatgtaagttggggaaacagccccaacactgaaactggcagaaagtcagcttaaaataacatgcaagttggcggggccccaacatagaaaaattggatcctcaatttctacagacgatgcaagttggggaaacgggccacaaacacaaaagctggcggaaagtcagcttctatgaatataataaaaaagctaggtaacaaaatgctacctaacttcatattcaagattatcaatcctatttgatataggttctatactattcattgtttacatgataaatagctgaatattacacaattataatactttactgactgtcttcttcagaattcttttcttgatcattttgatcagaaatttgttccatttctttacctaattcttttaaatcttcaaaatccgttaccatactgttttcttcttcatgataatttaattttggatctttgtctttagacataatcaatacctcacagatttttaattaagcaaagcgtgacgtaaagtaagctttaacatcttcaggtaaacctgcagccgcttctttatcaagaataacatttaccattctatgtgcttttaaatcggctggttcgaagcttgttttaccattttcttgatataatttttcaactacatctcgtttattagcacctgtcactactaagaaaatttctcttgcttccattagtccttgacgaatactaacatttaacttaccttgctcatcgatagaaacaacttgtaatgttaatttccctttattttctttagttttaatcttatcagcgattaattcgattgcatctttttcataagcaattggataaacttgacctgctggtacacctaacccttcgaaatatgattttttatcgtcataatctaaaatatttatttggctaaaatcaacagcatgtttttcaacatttttctttaattcatctagaactggcgcttgatctgtatctaaatgaaaacctgcaattgtagtaggattattgttaaattgctttctaataatatcagcagcatattctgctacaagttgactattgtcaaagactttaaagttcattgccatgatttctacactcctcttagtttgcattttacataaaaacggcgatattaataattattataccctaactttcaatatatcaaaccatttaagtttaacatgcttatactctaaatatagcacttaagcatcattttataatgaaaatagacgaattttaattcaatcctggaaaatcttgttgacgtaacgcttcataaattaacaacgcagcagtatttgataaatttaatgaacgaatatgttcactcataggaattcttaatgctgtgtcttgatatttctctttcacccagtctggtaatcctgtcgtctcttttccaaaaatgaagtaaaaatctttgtcatgatttgaaaaatcaaaatcactataagtctttttaccaaattttgttaataagtaatactcgccatttgtggcttcaaaaaatgcttcaatactatcatgatacgtaatattcacaaattcccaataatctaaaccggctctttttaacattttatcatcagttctaaatccaagaggtttaattaaatgtaaatgtgtgtttgtacctgcacacgtacgtgcaatgttaccagtattagctgggatttctggttgatataaaacgatatgatttgtcatattactattctctccttgtgtctaatccttttatcatttcattctgaacttctgcatcctcttgatcataattagcattgataaaatctcttgcttcttccccaagaatttgaccaatggcccaataagcagttgctcgaatcatcggtctttcatctgttattgcaacttttttcaattctggaattgcatccacttcattaaaatgcgccaatgctaaaatagcatttcgttgtatcggttttttaccacgccaagcacctgcaaggtgaccatatgtttgtttgaattctttattagacatacgtagtaaaggtactaatcttggctttaaaatttctggttccaaaataatgtcatcttgttcggtattaatacctctatttttcggacaaacttgttgacacgtatcgcaaccatataatctattcccaattttataacgatattggtcaggcatatagccttttgtttgcgttaaaaaactaatgcatttctgactatttaattggccatttccaactaatgcacttgttggacaacgatcaacacaaattgtacaatcaccacagctatctaataatggatcatcaggttcaaaaggtatactgactaacatttcaccgaggtatgtccatgttcctagtttaggattgatgacaaagccattacgaccaacaaatcctaaacctgcacgttctgctactgccctatctgataatacacccgtatctaccatagattttatttcaacatctggaactttagattcaataaatgaagctaacatgtctaatcgtttacgcataattgtatgataatcttgaccccacgatgctctagcaaataagcctctgcgatcacctctaacactcttaggtgcacctttcagtttgttaggataaccaactgcaattgctatgattgaccttgctgttggtaaggataatttaggctccgttcgtaaagcaatatcagattcttcaaatcctgaggcataaccatttgcatgatatgcttctagcttttgcttcaattcatcaaagcgatcggcagttgtaaatccaatactgtcgataccaattgtatatgcatagtcaatgatatcttgctttaactgctttgtatccaatcgtatgccccccataaaataatactatgttattttaacacaaccattattcatattgaggtttcatttcacataattttaataataaaaagcttgaatatatgatataactttgtggtgcgtatcatatattcaagcttcgttaggttgttataatactcttgctaagaaattttgtgttctttcatgttgcggttgttcaaatatttcgactggtgtgcctgactctacgacaacgccatctgccataaatatgactttgtcacttacatctttggcaaatcccatttcatgtgtcacaaccaccatggtcataccttctttggctaggtctttcattacttttaatacatcaccaactacctcaggatctaatgctgaagttggttcatcgaataaaataacatctggatgcattgctaaagctcttgcaattgctaccctttgcttttgaccacctgataattgattcggatatacatctgctttttcttttaatcccactttatctaataacgacaatgcttccttatgtaattcatcgttattatctttctttaataatttaggagctaaaataatattatcgacaacttttttatgtggaaataggttgaagttttgaaataccatacccattttttgacgtagtttatctacttgtgtccctttttccgttaagtcattgccttcaaaaatcacttgacctttagtgggtacttctaataaattcatacatcttaacaatgtacttttaccactaccagatggacctattattgctactacttccccttgattgatttcaagattgatatcttttaaaacttcattatctccaaaaactttattaagattgtttattttaatcactggcattcaatctcccttcaatcatgttcataatgcgtgtaagtacaaatgttaagacaaagtataatgctgctgccactattaatggtgtgaatgggtcaaatgaaataccttgaaccacttgtgcattaaacataatttcgccaactccaattgttgacacaatagatgattctttaattaaagtgacaaattcattacctaaagctggtaaaatatttttaattgcttgtggcataattacacttttcatcgtttgtctataattcaaacctagactacgtgcggcttccatttggcctttatcaacagcatttatacctgcacgaataatttcagcaatgtaagctgaggaattaataactaatgcaattgttccacaaacaagagctgaaatgtctagtcctaatgcagcagttataccaaagaatacgataaatacttgaactaacattggtgttcctcttaatatttcgatatagatagaagcaatccatgaaataatttttattttacttaatttcattaacgcaacgaatgcacctaaaatagaacctaatgcaacaccgataagtgaaattaatattgtaatcttaattcctttcaagaaaaaactaccatacttagaaataaaaccactgtcatcattcatcgcatttgcagcattagtcatatatttatcgattaatcctttatctttaacctctttaatcgttttattaatttgtgacaataattttggtgaatcttttggcacagctatcactgtatctttttcttcttcattaaatttcacattggaaattcctaatttaggattttgttttaaatatgcttctgctacaggtttttcaactacagcaccttcaacctttccacttttcaatgctaatataacgtctggtaaacggcttaatgaagtaatagatgcattttcaatttcggtttgagcgattttttcttgttcagttcccttttgtgcccctacttttttattattaaagtctttgatatctttatattcattaactttatctttctttacaagcatgatatttttagtcatcatatatgaatctgaaaaatcaacttgcttcttacgttcaggcgttgaagtcattccggaaataataatatcaatttttccagttttaagagctcctaacaaactatcaaatgacatattgacgatttttaattttaaattattatctttcgcaatttttttagctaaatcaatatctacacctgcatactcagtcttaccattaactgtatgctcaaattccattggtgcataatctgcagaaagacccactctaagttcaccgcgttctttaatcttctcccatgtttgatcttgttcagcatgtgctgtgggattgatatacaccatagcactgctaattaacaaccctaatactaatataaacctaattaaacacttcatttatacagccctccctaattaatattcataattatacatattaatacattttgatgcaatagtgttttataaatgtatttttatcaatataaagaaaagcttctttttaaaagactgtacataaaaaatccgctattatacgtgaacaaatctcacattttaaaatcaatcaaaaaagcgctactatcaatatcttattgacagtaacgcctatatttatcatatattaaaacttattcttgtcatcaagctataaattattgttttggaacttcaaatttataaatatcattagaatatataggaatgaattttttacacaattcatgaacaataaatgccgatacaaatggtatgacaaaataaccaagtgctaataaaataatattcattgttggatcacctgacattcggttaaatgcatttattgggccaactaatcctgtatatccaaatccagcagacaatggtgttcctttaacctgaagaacgtaagcaatgattccagtaattattccatttatagtcaatggtatcgaaataattaaatttttcaagtaaactgggatcatcatttttgcagctcctatgagtaaaactgcatttacaccaatagaattgacacgcaatgagccaaataagaaagtaacacaggcagccactatacctaggtttgctgctccacttcctagtccgtttaaactaatcgcagttgcaatcgctactaacgatattggtgttaccattaataatgaaaatgccacactaataagtatagacattaacaacggatttaagtctgtaaaagaatgaattacatttccaattgcttgagtaatttttcgaatgtaaggtaatgtgattagaccgatacccccactaacgataggtactaaaactggtaatataattaattcaaaagatccaagtttgttttgtaataccatatatataagacatgcaataataacaaccaaactcgtatttataatgtcacctataccttttaacataaaactattattactatatacaacagcacctgaaccaatcatagctgatgtacctactatagcagcacctgcgccattaaatttaaattgatgagcagctaaaaccccaataataaatgccataaatgattgaattagtatcactaactgatacgttaattctaaaatttcattaccacttttaaatatttttaatacttcacctaatagagcattcggaacaagtgcaataacaacaccagcaccaatagaatttaaaatcttactgaaaaactgtttattatcagcattatttgcgttactcataaacgacctccaatttgaacattaaactcatcatattatagaaaattaactttaacaatgattagttggctaatttaatctaaatataacaatccacaaaatgaataaagtaaatttaaacaatctactcactaatcaatgtcatgctaatcttaaaatactactaattacatcctgtgactaataatgtaataaattgtaaatattaaaatagccatattactattaagatagataaattgaatcgacttggtataaagcacaataaaatagcacttttacaaatatattattagaaaagttgaaacaaatatataaccccagataatataatcattatcattaatgtaataccaaaaaaagaagttaaacaatgcatagttgcttaacttccaatattgaactcatcattacaatttgacatagagtctattaaagcgtgtgccatttgagtccacttttatttgtattgtatagagagaaataaaaagaaaccttgttttacaaggtttctaatacgttatgttatgtaaataacagttaattataccggtggtcggggtcgaaccgacactccacaagtggaacgggattttgagtcccgcgcgtctgccaattccgccacaccggcttaatggtaaacaaaaaacttccctttggaagcaattatggagcggaagataggatttacacctatacctcgttccgggaaggaacgtgttctaaaagttgaaatactcccgcaaatattaaattatggagcggaagataggatttacacctatacctcattccaggaaggaatgtattctaagagttgaaatactcccgcattattattaaattatggagcggaagataggatttgcacctatacctcgttccgggaaggaacgtgttctaaaagttgaactactcccgcataaacctggaggcggcaaccggatttgaaccggtgataaaggttttgcagacctctgccttaccacttggctatgccgccaataactgggctagctggattcgaaccaacgagtgacggagtcaaagtccgttgccttaccgcttggctatagcccattaataataagggcggctgaaggggatcgaaccctcgaatgtcggaaccacaatccgatgtgttaaccacttcaccacagccgccatggcaggggcagtaggaatcgaacccacaccaaaggttttggagacctctattctaccgttgaactatgcccctattaaaaataataaatggaggggggcagattcgaactgccgaacccgaaggagcggatttacagtccgccgcgtttagccacttcgctacccctccataaatggtgccggccagaggacttgaacccccaacctactgattacaagtcagttgctctaccaattgagctaggccggctaagaaatggttcaggacagagtcgaactgccgacacatggagcttcaatccattgctctaccaactgagctactgaaccataataaaaatgtaatgatggcggtctcgacgggaatcgaacccgcgatctcctgcgtgacaggcaggcgtgttaaccgctacactacgagacctataaaatattgcgggaggcggatttgaaccaccgaccttcgggttatgagcccgacgagctaccgaactgctccatcccgcgataataaaaaataatggcggaggaagagggattcgaacccccgcggcccgttaaggccctgtcggttttcaagaccgatcccttcagccggacttgggtattcctccattattataggtaaatcgctattaattataaaattaaatggcggtctcgacgggaatcgaacccgcgatctcctgcgtgacaggcaggcgtgttaaccgctacactacgagaccattagtaaaacggaggaagagggattcgaacccccgcgagccgttaagcccctgtcggttttcaagaccgatcccttcagccggacttgggtattcctccaaaattatatggaccttgcaggactcgaacctgcgaccgaacggttatgagccgttagctctaaccaactgagctaaaggtcctaaatataattttacaactaataaatagtggcggtggaggggatcgaacccccgacctcacgggtatgaaccgtacgctctagccagctgagctacaccgccttatatagtttgtaaataatatggtggagactagcgggatcgaaccgctgacctcctgcgtgcaaagcaggcgctctcccagctgagctaagcccccataataattacagtatatcgggaagacaggattcgaacctgcgaccccttggtcccaaaccaagtgctctaccaagctgagctacttcccgtataattaacgcgcccgataggagtcgaacccataacctcttgatccgtagtcaaacgctctatccaattgagctacgggcgcatatgtttttattgaaaatggtgccgaggaccggaatcgaaccggtacggtgatcactcaccgcaggattttaagtcctgtgcgtctgccagttccgccaccccggcactataaaaatggagcagaagacgggattcgaacccgcgaccccaaccttggcaaggttgtattctaccgctgaactacttctgcatatgcgggtgaagggagtcgaacccccacgccgtaaggcgctagatcctaagtctagtgcgtctgccaattccgccacacccgcaaatggtgagccatagaggattcgaacctctgaccctctgattaaaagtcagatgctctaccaactgagctaatggctcttccatggtgccggccagaggacttgaacccccaacctactgattacaagtcagttgctctaccaattgagctaggccggcaatatgtaagaataaatggtggagaatgacgggttcgaaccgccgaccctctgcttgtaaggcagatgctctcccagctgagctaattctccgatttaaaactgcctggcaacgttctactctagcggaacgtaagttcgactaccatcgacgctaaggagcttaacttctgtgttcggcatgggaacaggtgtgacctccttgctatagtcaccagacatatgaatgtaatttatacattcaaaactagatagtaagtaaaagtgattttgcttcgcaaaacatttattttgattaagtcttcgatcgattagtattcgtcagctccacatgtcaccatgcttccacctcgaacctattaacctcatcatctttgagggatcttataaccgaagttgggaaatctcatcttgaggggggcttcatgcttagatgctttcagcacttatcccgtccacacatagctacccagctatgccgttggcacgacaactggtacaccagaggtatgtccatcccggtcctctcgtactaaggacagctcctctcaaatttcctacgcccacgacggatagggaccgaactgtctcacgacgttctgaacccagctcgcgtaccgctttaatgggcgaacagcccaacccttgggaccgactacagccccaggatgcgatgagccgacatcgaggtgccaaacctccccgtcgatgtgaactcttgggggagataagcctgttatccccggggtagcttttatccgttgagcgatggcccttccatgcggaaccaccggatcactaagtccgtctttcgaccctgctcgacttgtaggtctcgcagtcaagctcccttatgcctttacactctatgaatgatttccaaccattctgagggaacctttgagcgcctccgttaccttttaggaggcgaccgccccagtcaaactgcccgcctgacactgtctcccaccacgataagtggtgcgggttagaaagccaacacagctagggtagtatcccaccagcgcctccacgtaagctagcgctcacgtttcaaaggctcctacctatcctgtacaagctgtgccgaatttcaatatcaggctacagtaaagctccacggggtctttccgtcctgtcgcgggtaacctgcatcttcacaggtactatgatttcaccgagtctctcgttgagacagtgcccaaatcgttacgcctttcgtgcgggtcggaacttacccgacaaggaatttcgctaccttaggaccgttatagttacggccgccgtttactggggcttcgattcgtagcttcgcagaagctaaccactcctcttaaccttccagcaccgggcaggcgtcagcccctatacatcaccttacggtttagcagagacctgtgtttttgataaacagtcgcttgggcctattcactgcggctcttctgggcgttaaccctaaagagcaccccttctcccgaagttacggggtcattttgccgagttccttaacgagagttcgctcgctcaccttagaattctcatcttgactacctgtgtcggtttgcggtacgggcacctattttctatctagaggcttttctcggcagtgtgaaatcaacgactcgaagacwcaatgtcttctccccatcacagctcagccttaacgagtaccggatttgcctaatactcagccttactgcttagacgtgcaatccaatcgcacgcttcgcctatcctactgcgtccccccatcgattaaaacgattataggtggtacaggaatatcaacctgttatccatcgcctacgcctgtcggcctcagcttaggacccgactaacccagagcggacgagccttcctctggaaaccttagtcaatcggtggacgggattctcacccgtctttcgctactcacaccggcattctcacttctaagcgctccacatgtccttacgatcatgcttcaacgcccttagaacgctctcctaccattgtccaaaggacaatccacagcttcggtaatatgtttagccccggtacattttcggcgcagtgtcactcgactagtgagctattacgcactctttaaatgatggctgcttctaagccaacatcctagttgtctgggcaacgccacatccttttccacttaacatatattttgggaccttagctggtggtctgggctgtttccctttcgaacacggaccttatcacccatgttctgactcccaagttaaattaattggcattcggagtttgtctgaattcggtaacccgagaggggcccctcgtccaaacagtgctctacctccaataatcatcacttgaggctagccctaaagctatttcggagagaaccagctatctccaggttcgattggaatttctccgctaccctcagttcatccgctcacttttcaacgtaagtcggttcggtcctccattcagtgttacctgaacttcaacctgaccaagggtagatcacctggtttcgggtctacgaccaaatactaaacgccctattcagactcgctttcgctacggctccacatttactgcttaaccttgcatcaaatcgtaactcgccggttcattctacaaaaggcacgccatcacccattaacgggctctgactacttgtaagcacacggtttcaggttctatttcactccccttccggggtgcttttcacctttccctcacggtactggttcactatcggtcactagagagtatttagccttaggagatggtcctcccagattccgacggaatttcacgtgctccgtcgtactcaggatccactcaagagagacaacattttcgactacaggattattaccttctttgattcatctttccagatgattcgtctaatgtcgtcctttgtaactccgtatagagtgtcctacaaccccaacaagcaagcttgttggtttgggctcttcccgtttcgctcgccgctactaagggaatcgaattttctttctcttcctccgggtactaagatgtttcagttctccgggtgtgccttctgatatgctatgtattcacatatcgataacatgacataactcatgctgggtttccccattcggaaatctctggatcaaagcttacttacagctccccaaagcatatcgtcgttagtaacgtccttcatcggcttctagtgccaaggcatccaccgtgcgcccttaataacttaatctatgtttccaccatttttataagtcaaacgttaacatgaagttacgttcttttataaaaagatttaaacgcgttattaatcttgtgagtgttctttcgaacactagcgattatttcttatgaattcaagcttatttaaaactctttattcactcggttttgcttggtaaaatctatattttacttacttatctagttttcaatgtacaatttctttttagtcaagcgctcgcatactgctttattttcaaaagcaatatcactttaaccaaaaaatatttgaatgttaaataaacattcaaaactgaatacaatatgtcacgttattccgcatcttctgaagaagatgttccgaatatatccttagaaaggaggtgatccagccgcaccttccgatacggctaccttgttacgacttcaccccaatcatttgtcccaccttcgacggctagctcctaaaaggttactccaccggcttcgggtgttacaaactctcgtggtgtgacgggcggtgtgtacaagacccgggaacgtattcaccgtagcatgctgatctacgattactagcgattccagcttcatgtagtcgagttgcagactacaatccgaactgagaacaactttatgggatttgcttgacctcgcggtttcgctgccctttgtattgtccattgtagcacgtgtgtagcccaaatcataaggggcatgatgatttgacgtcatccccaccttcctccggtttgtcaccggcagtcaacttagagtgcccaacttaatgatggcaactaagcttaagggttgcgctcgttgcgggacttaacccaacatctcacgacacgagctgacgacaaccatgcaccacctgtcactttgtcccccgaaggggaaggctctatctctagagttgtcaaaggatgtcaagatttggtaaggttcttcgcgttgcttcgaattaaaccacatgctccaccgcttgtgcgggtccccgtcaattcctttgagtttcaaccttgcggtcgtactccccaggcggagtgcttaatgcgttagctgcagcactaaggggcggaaaccccctaacacttagcactcatcgtttacggcgtggactaccagggtatctaatcctgtttgatccccacgctttcgcacatcagcgtcagttacagaccagaaagtcgccttcgccactggtgttcctccatatctctgcgcatttcaccgctacacatggaattccactttcctcttctgcactcaagttttccagtttccaatgaccctccacggttgagccgtgggctttcacatcagacttaaaaaaccgcctacgcgcgctttacgcccaataattccggataacgcttgccacctacgtattaccgcggctgctggcacgtagttagccgtggctttctgattaggtaccgtcaagatgtgcacagttacttacacatatgttcttccctaataacagagttttacgatccgaagaccttcatcactcacgcggcgttgctccgtcaggctttcgcccattgcggaagattccctactgctgcctcccgtaggagtctggaccgtgtctcagttccagtgtggccgatcaccctctcaggtcggctatgcatcgttgccttggtaagccgttaccttaccaactagctaatgcagcgcggatccatctataagtgacagcaagaccgtctttcacttttgaaccatgcggttcaaaatattatccggtattagctccggtttcccgaagttatcccagtcttataggtaggttatccacgtgttactcacccgtccgccgctaacatcagagaagcaagcttctcatccgttcgctcgacttgcatgtattaggcacgccgccagcgttcatcctgagccaggatcaaactctccataaaaattatgatgtttgattagctcataaatactaaataatgtttgtaactaatagttacgtttttggaattaacgttgacatattgtcattcagttttcaatgttcgtttgtcacttacaagatttaattataactcgtaagtttttttaagtcaagaattatttttaattattttatttctaaaaaataaatttcctaactcaattaattcaacaaatattattttattatgtatttgttcgaatttcaatagtcaaatttacactttattaatattttaaatcaacaacttaaaacatttgttttttaaatattagtgccgtttgacgacttttatataatatcaagttattctagtagagtcaacataaaacaacacttatttttgtttaaaaattactgttgaagggattattttctattcgtaagtactatatgtatttaaagtgtaattccttatgctttttacttcagttttacaaacaaacttatactcactttatggatagttatttagtagaccttcgtttgaatatttttatgtttatttataaaggatactagttattagttaataccacttccgtagttagaatattcttttcttcaatttaaatatttttcagaataagcataaaaaagaagttaaacaactttcatgtcgtttaacttcttaaatattacacttacttatatgaagtaagctaacgcttttttaatttgtcatactaccaaagttaaattatttatcttggcattctttacaaactccataaatttccattcgatgatgtgttacgtcaaagtcagtcatatgctgagctaatctttcaatttcatttaactgtggatattgaaaatcaacaatcttaccacattgttcacatataatatgataatgattatgtgtattaaagtcgaatcgacttgatgagtctccatatgttaattcttttacaattccaatatctttaaacactcttaagttattatatattgtcgcaacacttatatttggaaaatcaggtgaaagtgcttgataaatttcatcagctgttggatgagtatgtgaagaaattaaataacgtaatattgcttgtctttgaggtgtaattcttacgcctgcttgtcgcaatgatgcaattgattcttctagttcatgttcaattgattctatttcaacactcatctatatcaccatctttcttatataataattattattacttactataaatataactgtagtattgcgcgcgtgtcaatatttacatgatgatttcatttaatagccttttttagcatcaacttcattctcaattagaccattcttattgagaaaattaactagattgtttttaaaaatatctaataagtcatactttgcctcataatcattaccagttatatgcgctgttatagttacattttccaattcatataattcatgattaggtttcaaaggttcattttcaaacacatctaaatatgcatgtcgaataactttactttttaatacttctattaagaccgcttctttaactatgctacctcgtcctatatttataaaaagtgcttcatctttcattaattcaaaatgttttttctttagtaaatgaatcgtttcttgcgtttctggtaaagcatttataataatgtcagcatttggtaatgtgctttcaagtgattcaatagtatatatctcgtcaaactcatctttgttctgacctgacttgctcagaccaattaaattcatattaaaagcctttgctaacttcgcagttctagtagcaattgcacctgtacctaaaaataaaactgtttgtcctgataggcgtttaccagttattttcgaatcatatatatgttgtcgttggttatcatatgatagtttcatctttttataatcatctaaaatgaaagctaaaatgtattcagataattgtttagcttgaacaccttttccattagttaaaagtatgccgtgatctgcaatataatctaacggtaatgtatttacacccgttgcaaaccatgcaatccattttaaattcgggcaacgttgtaaaaatgcctcattgataccgccatcataaccaactaatatatctaaatcagccaagtcactctcaggtatttctgatgcttttttataaaatttaaaatctaaatctgaaaagcgttgttgtaattcagtttcaacttcacgcatacgattcaacccaacaactttcatatatgtcaccccaaaatgtttttaagttcttctatttgtgttttaaccttaaccttctcgataacatctaatactttaccttgttcatctattataaaagtcgttcttacaatgcccatactttctttgccaaatgattttttcaactgatatacgccagtttctttagctaatttaaaatcttcatctactaataaatcgaaattcaatccgtgtttctcaataaaattttggtgttttttctttgaatcaccgcttataccatatactgcaacatctaaatcattgaacatttctaaattgtctctaaagtcacaagcttctgtggtacaagtaggtgtattatctctaggataaaaatatataatcgcctttttaccttttaatgtatcatttgtaatgacagttccgtcttgattttctaatttaaatattggaaattgttctcctttttgcaacatataatcacctttttcttcattataataattttatgatacgatattagatgaaaatattaaattaaaagaggttgatataaatgaattttagtgaaagtgaacgtttacaacaactttcaaacgaatatattctaggcggtgtcaattccccttctcgttcttataaagctgtaggaggcggtgcacctgttgttatgaaagaaggacacggtgcatatttatatgatgtcgatggcaataaatttattgattaccttcaagcatacggtccaattattacggggcatgcacatcctcatattactaaagcaattcaagaacaagcagctaaaggtgttttatttggtacaccgactgaattagaaattgaattcagcaaaaaattacgtgatgcaattccatctcttgagaaaattcgctttgtaaattctggaacagaagcagtcatgacaacaattcgtgttgcacgtgcatatactaaaagaaataaaattataaaatttgctggatcttatcatggccattctgatttagtattggttgcagcaggtagcggcccatctcagctcggttctccagactcagctggtgttccagaaagcgtcgcacgtgaagtcattactgtacctttcaatgatattaacgcatataaagaagcaattgaattttggggtgatgaaattgccgcagtattagtagaaccaattgttggtaactttggaatggtaatgcctcaacctggatttttagaagaggttaatgaaatttcgcataacaatgggacactagtgatttatgatgaagtaattactgcattccgtttccattacggtgccgctcaagatttattaggtgttatccctgatttaactgcatttggtaaaattgttggcggtggtttaccaattggaggctatggtggacgtcaagatattatggaacaagtagcacctctaggacctgcatatcaagctggtacaatggctggtaacccgttatctatgaaagcaggtattgcattactcgaagtactagaacaagacggtgtttatgaaaaattagacagcttaggccaacaactagaagaaggtttacttaaattaatcgaaaaacataatatcacagctacaattaatcgtatttatggatctttaacattgtactttacagatgaaaaagtcacacattatgatcaagttgaacattctgacggcgaagcgttcggtaaatttttcaaattaatgttaaatcaaggtatcaatttagcaccttctaagtttgaagcttggttcttaacaactgaacatacagaagaagatattcaacaaactttaaaagctgcagactatgcttttagtcaaatgaaataacttttaaggaagtatttttaattgaattaaaataaaacaaatgctcacatagtagattcattttatatcgttaactattaacgtttaacttgatatgtcactatgtgagtttttattttacaaatttatactcttttaatctctgactaaagttttacatcgctatcagtattatgtatgatttattttaacaactataaataagcttgaattttgtaactagtaagtgtataacagtaatgaatacgaatattagatattcaataaacttaaaaggggcgtcattatttttgagactaggagctcggatttttaaaactggtatagccattattttagctatgtctatcgcttctttactaccggatgatgttggtctgaaagccttagctggtgtcagtgctgttgttgcaatgcaacctagtatttatcgttcatttaaaacagtttctgatcaagcattgggtaacattataggtgccatattatctgttacaatggtaacaatttttagtgataattttatcattatgggtgttaccgtcatagtacttattgctattttatttaaatttaatttagcacatgttgctactttggcgagtgtaacagcattaatcattatgggacaacataccggttctttctatattaccgccttttacaggtttgtacttgtaatgattggtgtcataagttcatctctagttaactttgtgtttctaccacctaaatttgaaacaaaaatttactataattcattaaatatatcctcagatatttttatgtggtttaaattagtattaaatgatacgacggagtttaataatattaaacaagatagtcataatttaaaacaacgtgtcgaaaagttagagaaaatttatgattactatagcgaagaacgtcctattacaaaaaaacatattcaccaacagaatagaaagaaaatacttttcagagaagtagttcagacgactagacaagcttatgaagtattaaacaaattgtcgcgttatcaaaacgacttatatttacttaataacaatttcctattacaaatcaaattagatttagattcattaactgcttttcacgagcaaattttagctagcctttctaaaaaagcacgttataatgtgacacatgttgattatgagttagataatccgcagaaaaaagatttattgtctacatttcagcatgagttaataaatcatccttatcaaacggaatattcgtttgccaatgttatgcaaattgttgcagccatcgaagagtatcgacaccatttagagcatttagaccgcataagaattagctttttcacatatcatagatctgatgcagacattgaaattgttgaagaagactttgatttataacattaaaacaattcctataattaataccacaatgagataaagtaatattgaatctcgaaattaaatttaaaaaagcagtaagattattttcaatgaagaaaatctcttactgctttttctatgttatgaccccaccatcctgttacaaatcttccctacaagattgtactgaagtcaaacaactaatactttataagttttgaatgctatataaatgctcgtaagcaccttgttttgcaatcaattcacgatgcgtacctgtttcaacaatatgtccattttcaattacgacaattttgtcagcatgtgtaatagtggacaagcgatgcgctacgataagtgtcgttcgatctttactcaacacatctaatgcttcttgaataatggattcactttctaaatcaagtgcacttgttgcttcatccaagataagaattggcggattatttaaaaatattctagcaatcgataatctttgtttttgaccacctgataatttaacacctcgttcacctacttcagtgtcatatccctgtggcaagttcataataaagtcatgtgcattagccattttcgccgcttcaactacttcttcatctgttgctgttggacgaccaagtaaaatattttccttaactgtatcagagaataaaatattatcctgttgcaccaatcctatttgatttcttaaacttcccgttaaaaaatctttaatgttgtgaccatctattaaaatttgcccagaagttacatcgtaaaatctcggtattaagttaattaatgttgatttaccaccaccactcatacctacgaaagcaactgtttctcctttttcaatactcaaattaatatcttttaaaattggagcttcgttatcgttatattgaaaactaacatgatcaatatcaatacgaccttgtttaatttcaataggttgagcaccaacaccatttttgatgtcataatcttcatcaattaattggaatacacggtccattgaagcaaaactttgcgttaaagttgtaaatgatgcgactaaacgacgtaaaggcccgaacaataactccaagtatccaacaaatgctgcaagtgtacctactgtgattgatccagaaatagcaagatatgcaccaacaccgatgacaataattggtccaatatctgtaactgtattaattgcggcaaaggaataggcattccatcttgtatgtttcaacgcacgtgttaagaaattagtattctttttatcaaagtttttcgcttcattgtcttcaatcgcaaaacttttaacgactgaaataccttgaacacgttcatgcaagaatccttgaacctcagctaatgcttgagatctttcacgtgtcaattttcttaatcttccaaagaaaacgtacaccgttaaaatgtaaaatgggaagataaacagtgctgctaaagtcaatttcacatctaaaaagaacattatggatagtgcaataataattgttatacaatctaaccaaatattcattaacccggttaaaatgaaatcttttgtttgttcaacatcattaatcactctagatattacttgacctacttgattattagcataaaatctcgcacttaaagcttgtaaatggttgtataactttttacgtatatcatacaatattttattacttgtccattgcgccaaatattgacgtataaattcaattggtggtctcactattacaaaaataaataatgcgataccaatggcaatagttaaatgatgaactttttcatcagtcgttagtgcgtggttattaatcacgccatctattgcatatttaattaaaagtggtataagcattggtataccaaacttaattatcccaacaataatcgttgcaaaaatacgatatttgtatggcttaacaaattgcaaatatcgtttaatcatacaatccccccctaatctattgccctatcctattcataagcataaaaatgaatagaggttggatacataatttgtagatgtaaattcttcttacaatttacatttttaaaattaagatatctcaacctctgtcatattcatgtgattaaatacgttgtcttattcgtatgttatattctattcaatttaatctatggatactgtgtccccacacgacagcaaaagttatcatacttctttacatcactaagtcaatataaatgatttaatcagtatttacactttatttgcttaatactgtctaatttttttgtaacgttctttccaaactttgataaaatctggcgcgaatgggcccttcttctgttctatccattgttgaagaatgtccacgttgcgtcttaaaataatatcaatatcatgcggataattcatttgattcatatgttgctcatattcatcttcatctaataaatgatactttccgtttggatatactttaatatctaaatcatagtctatatattttaatgcctcttcatcacaaacaaatggtgatgacaaattgcaatagtaataaattccatcttctctaaacatgcagataacattaaaccaatattctgagtgaaagtaaacaattgccggttcacgtgttatccaagttcttccgtcactttcagttactaacgtatgatcattgccaccaatgacaacatgatcagtaccctttaatattgttgtttcagaccaaacgcgatgaatcttaccatcatgtttataactctgaattttaatgttttccccttctttaggtatggattctctgaccatactccacaccaccttctgttaatttaaccattataaattatagcatatttcagaaatagtattatataaatacatatttttacgaaataagattttactacttaataattaaactcggtaatattgctaagtactacaacagagatttacatgtcccatttaaagtatataaaatcatcacttttatatatcaacactttaactttttgacattgttattctatgagatttaaagatatcatttatacatttttaaaattaatgtcactatgttttccgataatcttaccaatcatcgaatgttacccatttataaattgataaatctttgacataggtacagggaatgtatattggtctcgatcacttaaattaaaccaaatcatgtcatctggtaatgtttcaatgttaattgctcctgaaacggcgtatactttaatcttccatgttaaatgagtaaattgatgcttcaactcaaaaataggtgtttctactggttgaatgtcatgaccgattttttcagtcattttacgtctagcatgctcactttcaaacataggaaattgccacataccatgcaataatttttcgctacgcttttgcaacagatattgaccttgattatttctaattaaaaagacggattgctcaattacttttttacttacatttttagatttaacaggtaacttttcaaatgtacctttatcaaatgcctcacagttttcttgaactggacaaaataagcataatggattttttggtgtacaaattaacgcccctaattccatcatagcttgattaaacgttccagcttctgtagtaacatacggtaacaattcttgttcgtacgatttcctcgtcgattgtaatttaatatctcgatagtcatcattcaatctagaccatactcgaaaaacatttccgtctacagttgctagtggtacattatatgcaatgctcattactgcagcttgtgtgtatggtccaacaccttttaacgctttaaattgatcaggatctttgggaactaagccttcatatttatcataaacttctttaatcgccgtatgaaaatttcgagctctactataatatcctaagccttcccaatactttagcacttcatcttccgaagcttgactcaaaacttccacagttggaaatcgttcaacaaaacgatgataatagtcaataactgttttaacttgtgtctgttgtaacatgacctcacttaaccaaatatagtacggattggtcgtttgtcgccatggcatttctctttgattttcatcaaaccagtgtatcaaattttctttaaaactagactgctgatacatttataaaaccctttcctcaccaaaattaattgtctttactcataatgtttttattgtacattaaaatcatggttagtatgtaagttaatttagttatttgcgaaattggattataatagtatttataatattatgaaatgagtgaactgatatggacactgcaacacatatcgcaattggggtaggccttacagcacttgcaactcaagatccagcaatggcttctacgtttggtgcaacagctacaacccttatcgttggttcattaattcctgatggggatactgttcttaaattaaaggacaatgcaacatatatttcgcatcatagaggtatcacgcattccatccctttcacaatactatggccaattttaattacatttttaatattcacgttctttagtggaaccaacccatttcatgtatggatgtgggctcagctcgcagtatttttacatgtctttgtagacatattcaattcttatggtacacaagcacttagacctatcacaaacaaatggattcaattaagtgtgattaacacatttgaccctattattttcacagttctttgtattggtattgtattatgggttataggcttgcatccatttgcagttttctttcctataatcgctttactaatcatttattacatgattcgttttaaaatgagagccgtaattaagcaacaagctttaaaagcaattcaacaagagcatcaccctgttaaagtatttgttgcgccaacaataaaatttatggaatggcgtgtcgcgatacaaactgatgcacatgactatgttggaaaagcatatggtaggaatgtggtgtttagtgataaagtggaacgtcaaacattatcaacagactccattttatggaaagtcaaaggtaataaagatatacgtacttttttaaacttttcatcaatctatcgttggcaaacaacaacgttagcagatggttctactgaaattcgtttgattgatttgcgttatttaaaaaatgatcattattcatttgtggcaattgcacatgtaacaaatgataatgtcatagaccactcttatattggctgggtatttacagaagataagttacaacgtaaactgtatgctaaataatttcaagttattattcactaaagttaatctataaaaaatgaacaaccgggcagaatgaaaatcaaaacgatttttactctgtccggttttttaatgtaaaactatgaatgcttttacaaaacctaaaatttatattgtcgctaacaaactacctttaatgactcgaaatatcaaaatcagtataggaaaacaatatctagatgatattctaattgtttctgattctcacagattaatttacacaacaggtcagctaaacatcatgaagaagtatccgcctcgtctgtactatcatttgaaaaatcttgttgattatcagtttgtgtcactttagatgttttattataaattgcgtgtgtcgtataccttgctaatacgaaatttactgcagctattaaacataagaataaaataaagtaaaaatgatatggaatgttttccatacttgatataccaaatatgatagattgtgctataccattaacaatgtaatatattggattcagcattaggatgtgattgataaatacatgatttggatttggtatgaaaataattggtaacaataagaaacacaatacacaaatcccataaaatatgatatttattttttcggttaacagtcgaataagaccaaaagtaacggatattaatcctacaaaaatagttgccatcacaataaaatagaatagcgctatatatgatgtttcgaagtttactggtttaaccaatgcacttatcatcgtcaaaatgactagcataataaaacttaaaatagacataataactactggcgtcgctgcggaaatattaaataacttagtcactaaaaagtcattcatataatgatgataagagatataaattgtgaacatcaataccgcaaaaacaatcaatgcaataattctaaataaccatcgcacctctttaacatcggtcaaatgactaaaggaaaatagcgtttcacttgcaataataagtattaaacatgcagctaatacgattagaaaacttttccaactttgttttaaacgttctgttacataccttttagtatgcggtaagtttttaaaatataaaataatattatctagcatctttacacctacaattcaatataaatccatttgtcttctttcaaattggcaatacaatatccattcccaactttagtaatccaaatgttattgttaatattaaacttatcttttaattcttttttatctacaattggataaacaaaaccgtataactgattattatcattgaaaagtaattgtatcggttgttgtgtaacggatgcaacgaaacggttatcatcatcaggaactaaagtttttataactgaactatgctttttatgtaattgactattaaagtatgcatagtaattactataatttgatttcatatatggtgctaattttttaaaactatgcgtttgatataaacctgccgggttaaaatattctaatttatctttactaacatagtaagtcttattatcggcggtaacacgataatttttactattttcgccagtaattgtaactacactatattttggaattgtgacttgtttatccccttgcatatccacactgccattaaaagcaattccataagctaacttttcgccatatggatctttattttcattttgcatcgtagcacgattcgtaaaatctgttatcgaaataattcctatattattgaaaatgagcaacatcatcaatgctaagcctaaaatagtacctgaggctaaagtccaaaaacgcactaaaaacttaggcggttttgcatgattatagcgctcaacgcgtttgaaattataggtcatctctggtattcttgtacgattctttttccaatctaaatcaaagttttcaatttcttcttttgagtttaaacttaatcgatcacgttcatgttctttaaaagatggaataacttgtttaagtgacccttccattcttaattgaccatgtgaaaaccaagctatatagttactcacttgtgaaattttatcaatatcatcaccaattgacacaatcgttaaattattttcaatataatcatttgttaattcaatcgcacgttccataaattgtggtgttaaatagtcaataacatgatttaaaataataatatttgactttgatgagcgtgcaatacttaatagtaattgagcgtatgccgctttcgaaatatggttaaccggcttcgttttataatcgcctaaatgtgcatattgaataatctgttcagctttatgatcattaatttcatatggaaatagttgaactaactgcgctgtgtaagcttcaacagtttgatgaattaacgattgatcttcaatatatccgtagaacaaatcttcagtacaaactactttacctttatcaggtttaattgcacctgccaacaattgacctaccaacgctttggaagattcaggttcaccaattatacctaatgcttctccttgataaatatgtaaactaatattgtttaaatcgatatcttcagcatcatatccaaaaggtaaataccatttcttattctgtttattcctatagtagtgtgttacttttagtaactttaaaacaattgaacttcccatctattttcatccttctataattgtaataacgctataggtaagccttcttcgggttcatcgctattaaatctaaacccccacgcaaaaataccttttaatctttctactttaaaatattgattactgccatcagtcagtttataaattttaccaatttctatcttttttctgtctactaagtaactttcggcaacaattactttactttgataaacgtcatattcatttaaaataccattcatctcagcttttctcattttctctttataaagttgtatttcgtgtcttaattctggctcagacatctcactcaatttcttctgttccatcggcaataccactttcttctaatttagctttaattttatcatatttatatccttttctcataaggccttcgatagtttttgaaattaatttctgttgcgtgtacttctttcgatttttattataaattttttctaaatctcgttgtaataaatcgtctaaaaccccttcatcttgtgtaaaatccatttcattcaatacagcatgaatggtttccatttcaaaccctttttgaattaaagattgcattactttttctttaaccttattttgtggccctttttttgttttagatattttttcagcaatttggataatatcatcaagttcctgttgttctctataaagttctgtaaacatttcaatgatatttggttctataccaagttgatatagtttttgttgataaattttaggtcctttatctgtcgtgcgaatcattgtattctttaaactttccgcataatcttgatggtcgattaacttttcgcgataacaatattcaatcacttcagaaatcgcttgctctgatatctcttctttttgtaaatattgtataacttctttttcagttctctttttatatgataaatattggattgctttgtttaaacctatgcgataatgatcatacttttgaatctctgccatgtcagcagcttcaagttgttgccctttttttaaattaaatttgactaatgtatcgatatctatacccatttcaaattgttcgtctaaaaaaagattaaaacgttctttgtttttcttttgaacttctattttagtaatcttcggcactggatcaccccgttactttctcaagttttaatacaatactcttttattattcaataagccacttcctatagcaaatgtttaactttaaatatttttcgatgctaacaaaaaatcacactatcatcttttaaaatgaaagtgtgattacaagcaaatctgtaaaatttataaagcagaaacaattcaactttatcattatgacatttcaattaaaccttctacattatagttccaagcatcttacacatgaatgcaagtatttaacgatttaattgtgacatagcctgttgatattgtgtttcattgatataattttgttgcttcattttttctaagttcgtgcttacacgttgcgtaaaattctctgacatattattgatattatatacgctaggtgcattgactttactagctaaaatagcgctttgtaaaactgttatgtgagacattgttgtactatttttattcacggttgttccaaagtaatggtttgctgcgccctcaagcgtatattgattatccccaaagtaaatattatttaaataaaagcttaaaatttcgttcttattatattgtttttcaactcgatgagctacaaataattcttttacttttctagtaaatgaacgatcattatcataaaaataatttttgacaacttgttgtgtaatggtactaccaccttgcacatctctgtcgctaatcgttgaaaataaagctctagttgtacctttcaaatcgaatccatgatgattgtagaatcgttcatcttccattgaaataaaggcacctttaacatactctggcatgttatcagctgacacaaaactacttttattttcaatttttcttagttcatccacattatcgcgtgtagataaaaaatacatgataccaataaacaatgcgataatgattagaatggttaataatatttttaatagtattcgtttactttttttctttttcggcggtttgccaactggttgataatacgtattatagtgaggttcgtgtttcatatgctcaaaatgttcatttgagtttgagtacctatcgcttcttttcatgcgtttgctccttcttttaaaactcacttagtatataccttgagtttaccagtactatcacaaataggctacactttttgggaaaatcagtccaagggcttacaatcgtatacgccatcatacttactttttgttttttgaaaagattatagataaatcattgcgattttaaatattaatcatgtcaaatattgttatattttataaaaataaaagaccatccctattaaatgccaatagagacgaccttttatttgttattcattttttaaaactaaaatccatatttcatttcaaacgaaaatatataaattttaacaattgataaccgcaatactctattgtaattgcttaacgatttctcgattaaaatcatctaaatcgtctggtactcgacttgttacaatattgttgtctacaactactgactcatcaactacatgtgcgcctgcatttgataaatctttgcgtacatttaatactgctgttaacgtacgaccttttaaatcgtctgtatctattagtatttgtggcccatgacaaatggcaaatgttggtacatcatttttagtaaagtatttagcaaatgtgccatatcgaccttctgtatctccacgtaaatgatctggtgaaaatcctccaggaattaataatgcatcataatcttctggtttagcttctgcaatgcctacatcgacagtaactttttcaccgtgtttaccaacaacttcactatttgcagtatctccaatcactacagtattaaagcctgcattctctaatgcctctttagggcttgaatattctatatcttcaaattcgtttgctagaataattgctacttttttagtcattgaaaatcacctttctatatatcattgatataattactatagacaagtaaatcagtgattaaacatacaagatataaaaaatattaagcgcctgtcgcgatatctaactctaacacatcttatgtggcatttacttagatactaatttaaccttttcttcaagctgatctaacaatccaatccattcatctatatcttcaacacgtacttcatcaggatttacatgatcgatatcctcaataaacttatttaaacgcgcttttatctgttcgattgtttgctgttcattcataaaaagttaactccttttattttgttttctttttcattattatcctaacagaaattgcgttaaagcgatataatcttagctatatttatgacattcaaattattttgacttttaaaaatccccttttcaattaactaaaattaagagataatttgttacgagtgataatacgaagtggtatcataccgatatgaaccaaatagaaagaaggaagtttaagacgatgaatagcgtcaaattgaagcaacctgttagcatttacaatgatccatgggaagcatataacgatgttaaagaacatggccaattaactttaagtaacatcgaatttacaactacaaatctttgtaatatgcgttgtagccactgtgcagttggttatactttacaaactgtcgaccccgagcctttagatatggacttaatttatcgtagacttgatgaaattccaaatctgcgaacgatgtctattacaggtggcgaaccaatgttttctaaaaagtctattagaaatgttgttaaacctctattaaagtatgcacatcatcgaggtatatatacacaaatgaattcaaacctaacattgcctcaagatcgttatttagatattgctgaatatatcgatgttatgcatatctcacacaactggggaacaactgatgaattcgcaaatgttggctttggcgcaatgaagaagcaaccaccgttaaaagctaagttaaaattatatgaacaaatgatttcgaatgcacgtacattatcagaacaaggaatgtttgtatctgcggaaacaatgctcaatcaaagtacgctaccacatttacgaaaaatacatcaagaagtcgttcatgatatgaaatgtagcagacacgagattcaccctatgtatccagctgactttgcaagtcaattaaatgtgttaactctagcggaaatgaaaaagacaattcatgatatattggatttcagagatgaagatatttggatgttatttggtactttgcctgtgtttccatgcttaaaggatgatgaagatcaaaagttactatcacgtttaagaaatgctaaaaatgtaacgactagaaatgacccggatggccgtagtcgtttaaatgtcaatgtatttacaggtaatgtaatcgtaactgatttcggagatgaaacaggtacaatttcgaatatacaaaaagataaattaacagatgtatttgataaatggttatcctctgatcttgctaaatcattaaattgtcattgttccgagtttagttgtttaggaccaaatgttcttgttaaaaatatgtactatccgaatatggattttaaagataatgagcgtcatatgcacaaacaaccacaaattatacaattttaaaaactcttaattatgcggagaagcactttatcgataagtagtctccgcatattttaatgctattataaaataaaaaacaattaattgctggcagtactctacttaaataataaagggcatttaataggactaatagtctataataaaaggggtaaattttaactaaaagcataaacgtgcataatcaaaaagacagattgtaggtggaatattcgaacataacagttcaattcatccttaacaatctgtctttatatttttagtctctaatatgttgcacttgagctaaatattcaattgtttgtttactttcaatgcgacgtgcttttcttcgttcaacacgttgtggtgctgtatcataaaaccatttttcaacatcatcttctggatatacaccaggtacatgtttaggtttgccttcatcatctaacgcaacaaatgttaagtaacttaatgcagctaaatcatgcttgttattaaatacatcgtcaattctaatttgaacgaccacttccattgaactagtcccagcgtatgaaaccatcgctacgtattgtaatatgtcccctgttttaatcggctttaagaaatctactgagtctgtagatgcggtaactacttgcgcaccagcatgtttcatagctgtgattgctgcaatttcatcaatattagccatcaatgtaccaccaaacattgtatgatggtgattcgtatcttgagggaaaacttgtctatttttataacattttgattctgacatagatttcattggtctgtcctgatttgtcattattttatctcccaatctatactttaatcacgtatttgacctttaaatacatgtttcatttcctactcagcacctcaaaataacatttattaaaatgttgatgcccaatttccattttcaaatactagttcttttgaaccatcttcgaatatgccataaatagtcaaatcactactaccaatcatgaaatcgacatgtacatttgaatcatttaatccgcttgcaatcttttcctcaacagtcatttccgttccaccttgaatattaaaggcgtaagcagatccaatcgctaaatgacatgctgcattttcatcaaataaagtattgtaaaaaatggtattacgatttgatatcggtgaatcatcaggtactaatgctacttcacctaatcttcttgaaccttcatcagtattgattaaatctttcaataccgcttcacctttttcagctgaaaaatcaataatctctccatctttaaacatcaatttaaattgatcgataattgtgccattataacttaaaggcaatttattagtaacatatccatctactctatttcgatctggtgctgtaaatacttcttcagttggtatattagcaataaaagcttgttccttgccgttaacataacttgtagcatcttcccagatatgatttttcgctaaacctactgttaaatcagtaccttcagatacataatgcaacgcatggtaatttttttgttgtaacttttgagcgtaaacacttaaattagcgatgtgttgacgccaattttcaactggatcgttaccatcaattcgcacaatatcgaatacctcgtcaataaacttaatatatgcttcttctacagatagttcaggatacactctcttcgcccaagctttagatggaaaagcagctacgacccatggaaattgatttttttgtacactttccatatatcctttaaatgcgcgtgcgttttgttgttgaaatgcttgtaatttttggctatcgataccatccattaaatcaggatcttcactaataagtgctaaattagcagcgccacgtttaacgtaatccattctcgcttcaacatcatatgattttaactcatgattagcaaaatgttccacagattcattttcaaattttaagcgttttaaggttggatcgctatatacaacacgtacatctgaagcgccacaatgatatgcttcttctacaattaaatgcgttaattctaatgtttctactgatgatctaataaatactggctgttttggttgaacattcataccaaccttaactaatagttcagcgtattgttgtaacttttctttgtaattagtcaaaattcccactcctagtcgtgtcgcaattgtcctaaagcgtcagcaatagctgtcacttcacttggcgacaatctttctcttgattgaacaaaatcatatatatctgttaattcttcttcatttgcatttttatatttttcaggatctaataatccttgattaacaatatttaacttctctctaatagctaatactttctcttcatttgtcatagccacaatgttcacctctaataatagttatgttatcaaagtatcacaatttaataaactttaatagaattttatataatctgctttcttattgtttaaagtcgctataaaatggggatataactacatagtttggaggaatcaaaatggtagatgtagcatttgtctgtcttggcaatatatgtcgttctccaatggcagaagcaatcatgcgacaaagacttaaagacagaaatattcatgatattaaagtacattcaagaggtactggtagctggaatttaggagagccgcctcatgaaggtacacaaaaaattctcaacaaacacaatattccatttgatggcatgattagtgaattattcgaagcgacagatgattttgattacattgtggctatggatcaaagtaacgttgataatattaaatctatcaatcctaatcttaagggacaattgttcaaactgttagaatttagtaatatggaagagagtgatgtaccagatccatactacacgaataattttgaaggtgtatacgacatggtattatcatcttgtgataatttaatagactacatcgtaaaagatgcaaatttgaaagaggggtagttttttatggaaaataaatttgttcctggtattttaattggtgccgtaattggtggtgcaattagtttagctgataaatctacacgtcaagctttagttcaatcagttaaagatgcaaaaaatggtaaccgcactcgtaagccttctaaagtcagcaagattaaagacgaagttttatactggaaagatgttgttgaagaaattcgtcgtaataatcctgaattagaacgttcattaaaagatgcgaaagaaacatttgttaatagaaaaaatcaacgctaagatgattttgtttttataaggcaatacttaacaatttggtgtacgcctttcatagttatcattattaaatgataatacaatgattggccaaactgcattgtttcagtattgcctttgttttaattttaaatcaaaatagcctatgaaagatttaaatcaaataatttctataatattatcatttttaaagcatatcattgtttagtttttttataattggataaatactaatagttactttataaaacattacatagagaaaggttaaggagtgcacatgtcgaaaaaggatcactcttcttcaaaatatcttaattctgttaaggaagcacaagaggagtcaaaaaagaaaaataaaagtaatcccaaaattgatgttgatcgtacatatattgaacctcaacaattccaatctaagaaacctaaaaaagatgatcaggttttcttcttatcaagattaaataaacctgcaaaatataagaaagactctaatttcttatcatatctcatctatcgcataggaaaagatgatgcctcaggactagcagcacaaatgacttaccatttcgtacttgctatgttccctatgttgcttttcctattaacattattaccatttttcaatattaagcagagtcaaattactaatatgttaagcaatgcacccgctgaaacatctactctaattaagagtgtaattggtgatataactcaaaactccagtggtggcttattatctatcggtttgattttagcaatttggtcagcttcaaatggaatgactgcaattatgaattctttcaatgttgcttacgatgtagaagatagccgtaatggaatcgtattaaaactactaagtgttgtcttcactgtagttatgggcgttgtgtttgtagttgctctagcattaccaacgcttggttctgtaattagtcatttcctattcggtccacttggatttgacgaacaagtgaaatggatttttaaccttattagaattgtgttaccaatcattattatatttatcgtatttatcgtgttatattcggttgcacctaacgttaaaacgaagcttaagtcagtattaccaggtgcagtatttacttcaattatttggttagctggttcatttggttttggttggtatatttcaaattttggtaactattctaaaacatatggcagtatcgcgggtatcatcattttgttactatggttatatatcacaagttttattataattgtcggtgctgaaatcaatgcaatcattcatcagcgtagtgtaattaaaggtaaaacacctgaagaagcagcattagaacatgatgacaataataaaaatcattataatgagaacactagatacgaatatgatgaagatagtaatgcaacacatcaacgtacgtaccatgttgatgaacatcctagtgatacctatccagaagatgataaaaatataaaagacaaaatcgttgataagcttaaaaaagactaaacaccaacaaaacagaggttttcgctaatgattgcgaagacctctgtttttggtgtctatttgatgttatattgtgattggcgtaagtaacttttcttaattcaatacgaactattgaattaaattatgttggaatgcatagatgacagcttgtgttctatcttgcacttctaacttacttaaaatgttactcacatgtgtcttaaccgttttaatagtaatatgcgatgcactagcaatttcttgatttgagtaacctttcgcaatcaataataatatttccatttctcgttctgtaagcatttcatataactctgcgcgctttttcatacggttacgcattttcactaaaacttccggttcaaaaacagattctcctctagaagttttacgaactgcatcggcgatatcttttgcacttgttgtttttaaaatgtaactatcgacacctgcatctaatgcacgatatacctctttatcttcaataaaactagttaacattaatactttaatttgcggtaaatcttttttaatctgagtcgtcgcttctacaccatccatgtcatccataagtaaatccattaaaattaaatctggcttcaactcatgggctttggcaattgcttctttaccagaagcgccttcaccaactacttcaatatcactttgcgttgatagataacttgaaattcctatacgtaccatttcatgatcatccacaaacaatactttaatcgtcatacgaatcctccttatttaaaggtgctttcacctcgatacgtgtacctgaatctggcaatgatacaatatggaacgttgcaccaatttccaaagctctttcacgcatatttttaagtccataactttgttctaatttttcatcaacattaaaacctttaccattatcttgaattctcaacaataaataatcgtctttattaaacaattctactgtcacttttgtaccgtttgaatgacgcaatgtattcgaaattgcttcctgtgtaattctgaacaaatgatcttcaatacctttaggcactttaaaatcttgtatttcatgcacaactttcattggcacttttttttgtaaatcaataactaaatctttaataccctcacctaaagatttgtcttttaaaccaagcggtcttaaatgtaacagcaaagcacgcatttctaactgcgaatcttgaaccattttctctaaaataggaatttgttggtctaatggtggttctaacttcgtttctttgatagcagatagcatcatacttgccgcaaaaagttgctgactaacagaatcgtgaagttctcgtgctagtctttgacgttcatcttcaataatctttttaactttcacatcattaatattataattttcattggttaagttttgagttttaagtcgcaacttatgcaattcttgatttaaaggtacgagtgtatggtataaatctaacgtttcactatatatttctatattttgatcattaatgccaactgtttcgccttccattgaacgctcaatttgcgtcttaatccaatcattttgctgattgattttgtaagcgagtaccgaaccaacaataatacacaataatatgatgatgagatttaaaaataaaaagactggtattccgaatatttgtgtataaaacataccttgaaaatagatgatatttacaaaaactttatcgatgaacagaaatgcagctagcatgctatatactaagatgagcattgaaccaattgttctaatgtagtggttcatcgataaatcacctctacgtctccgataaacgttgatacgtagatattaactgtatagttatccggtttcatcatttcttcaatatgaatattgttattttcaactttatatgatttttcattcacgtaagtacttccataaaaagcagctacatgtaaattaatattgtaattaaccggcaatataacctgcactttacctaaaatgtgtctcacaacaatggtattattttccttaatatttgcagcttttgttaagtcaatatgtaggtcgccaattccatgttgaatttgtacatcttcccacttatatacataaactggtgtacgttgctcaccaaaccacttttgtttaataaaagatggtgaagtcataacctcatccgtcgcaactactttttttggtttaaacttgtgtattaaataacgcacaataagtagtaataaaaagacgaacaagatgatgattgtatacttattagacaataatgtgaatgcaattaatagcgcgcctatccaaaacgccaaaaggccacgtattttatgaaaataaagatatcctacataaactaatacacatcccaataatagaacgagtaaaaagccaattttttcaaaaaatatgtagtaaaaattggcaataatcattaatgcagtaaaaatgatcaacatttgcgttgatatatatttgtgtgtcatgtttcgccgcctttctatgccacagcgttcatataatttattagatacgatgttttttctgttgctattttttcagttgaagtttgttgaatttgagtttcaatttgtgcataatatgcttcaactttattcaactctgatttaatattttcaatttcttgattattgatttctcttgcacattgaatttgaaatgcttcagcaatatcaatatatttattttctaatgttagcattagactgtcaattaacttgctaagttgttcttttttagtaattaaataacgcatataatcatctaaatttttcattttttcatctagcattaaaaggtagtgcttgatattatttcttactgttgctctcaaaaactgttcaatataacgttcaacatagttcataactatcaccttttataataagttttaaaataccaaatgcgctatgtatcttcgttgatgtcgatgatatgtttgcttaaaaactactttattacaacatatttttgaaatgacgcattgattgtgttcttaattattataaaacagttccgaaaccaatatgaataggctccggaactaaatgatgttcatactttagtcttagtatatgttgaactattcttcttcaatttttgtcgttaaaatcggaccatccttagtcacgataaccgtatgctcaatttgagcaacaaaacttttatcgctcgtttcaaaagcccattcatttttaccttctgtaacaaatgatgcatttgatgagataaacggttcaatagctaataccataccttcagttaataatgttttgtcttttggatcaaagtaattaagtacatgtgctggtgcttcatgtaatgataaaccaacaccatgacctgttaagtttttaatgactttcaaatcattttgtctagctgtattatgcaccgctttaccaatgttacttaacttagtacccggttttacttttgcaattgcattctcaaatgccatcgttgctacgtcacatactttttgtttcattggatcatctgattctccaacgacaaatgaaatgcctgtatctgcataatagccattcttcaaagccgatacatcaatatttactaaatctccttcacgaatgacacgcttacttggaatcccatgtgccacctcttcattgacactaatacacgtttgaccaggaaaattttcatcatgaattggcgcagaaatagcaccgtattcttcaaataactctttcgcaatattatcaagctctttcgtagtgatacctggtttggttgcagcttgcattgtattgcgcactttagcgcatatgtatccaatttcttttaacgcttgtaattcttcttctgtttttacaatcattttatcccgttccttttttatataattataacttattatagcaaaaattctttgatatactaaagatgttactttagtattttggaaagtgagtgggacatagtgtgataaagaaaaaatatttctttatcgttgtaccccaacttgcattgcctgtagaaattgtagatccaatttctctatgttggggccccgccaacctgcacattatcgtaagctgacttttcgtcagcttctgtgttggggccccgccaacctgtattgcctgtagaatttcttttttgaaattctctttgttggggccccggactataattgaaaaatgcttgttacaagtgcattttatttcagtcaactactaacaatataacattgtggagcccagaactttgattaatgtatatgaaaatcaaagtaatgcttaagtatgattatttcaaatattttacatacatgaacttttccaatgtacgatactattattataaagcgctcgctaagattttacgatgattagaggttaaaaaatgaacgatcaatggtataaacatttaattggtgccagaacaattaaaactggtattgccatttttttaacagctgtcttttgtatggcactagatttaacacccatctatgccattttaacagctgtagtcacaattgaaccaactgccaaggcatcacttattaaaggttatcgtagattacctgctacggtaattggtgcaggctttgcagtattatttacatatttattcggcgatcaatcaccttttacatatgcattgagtgcaacgttcacgattttattctgtacaaaactcaaattgcaagttggtacgaatgtcgctgtactaacatcattagctatgattccaggtattcatgatgcctacatattcaactttttgtctcgaacattgacagcaattattggactcgtgacatcaggtttaattaacttcatggtgtttccacctaagtattatggtcaggtcgaagaaaaattaagtaagacagatgccttgatgtataaattattttacaatcgctgccaagaacttatcttatcaagactgcaatctgataaaagcgaaaaagcatataaaaatattttcaatttaaacaatcaagttgaaacgttaataagttatcaacgtgatgaattaagctatcataagaaaaaagaatgtgattggaaattactcaatcaattaactaaacgtgcatatacgaatcgtttgtttatcactcatttatcaaatatcatttacttgcctaaaaatactcgtgttaacttttcaggtgacgaaaaaatggcattgctaaaaattagtagtagcatcaaagatatattttatgatggttcttttaagagagaagatgattctgtagaaactttacgttcgacaataaaagcacttgaaattagtggtgaaaatcaaattaaaagtcatttactatacgaagttctaatgatttatcgactgctagacagcagatatgcttaatttaagtaccttatgctaattggcaccatgggagtgggacagaaatgatattttcgtaaaatttatttcgtcgtctcaccccaactcgctttgcctgtagaatttcttttcgaaattctctgtgttggggcccacaccccaacttgcattgtctgtagaaattgggaatccaatttctctttgttggggcccctgactagaattgaaaaaagcttgttacaagcgcattttcgttcagtcaactactgccaatataacttcgtagagcatagaacattgatttatgtccccgcctctttttatcgtatatagcatgtccctttttaaaattacaagcataaatattcagactcaaatatagccacacgcctaaactacggagggatgtggctgtcttttttgattgtaattatgtatcagatttaaatcattaatataaagaggctaattcattaataaatttagtaaaatctgatttagcaacatttatccttaatgaaataccagattctgttgccatgtttgaatgccttaaaccagaatcaaaatcaatataaatacaaagcagttcttgattaaaatcaataattgtaaaatgtaaatcaggttctataaaatatatttcagtaacaggattgtcgtaatccatatgtttcaaattgtccatgtcactatcaaaaagtgcaaattcaaatttaacttcttgatcttcgaaagttgcactagtgtcgaaataataaattttattatcttcttcgataactacatcttttaaaataaatgttatcgatgttttgctatgtaaataagatgcatctcttaaaatcactttagtgggcttcatcgtcaaattcctttcatcattcattttttcatgttgcataatcaccattactattgataattctaggatagatactcattgtataataattattcactagaacaaaaaaacacacatcaatttggttgtttccatccaaaataatgtgtgtgtttatacatatatgatttattactaaacttcatcgtttatcaatattaaatccattgatgcgatgttcagagttaacgagatttcttctgtctatttgctctgtctattaatacttgtttcgcttgtatttccgcttcattatctatttctttaggctcaaacggaatccccttacgttcacaagctttttctaacagataatcagtgatttcgtaatttttaggtaaaattggtccgtgtaaataagtacctaataaatttttataatgaatgccttcttttttatcttcatcattattaccataaccaaaagtgacatgaccaagtgtaccgaaatcatgaaatgttctaccaccgtgattttcaaaacctacaatagttccaaaagtatcactttcgataataatatctcctgttaatcggtttgtctttgattcagtataaaaatctaaaatacctaacccttctaattctgtaccatcaggcgtgatatatttttttcctaaaaattgatagcctccacaaattgttaatcccggcataccatcttcaatcgcttctttaagtggtgtcttaattttacttaattcttttgttgctaatgcttgttctctatcacttccaccaccgataaagaaaatatcacattcatcaaaggtaataccttctgtttcattgatttctacgacattaactttaatatttcgttttttagcacgttgtcttaaagcaataatatttcctatatcactgtataaattcaatttatctgacataaaatgataaatagtcaattcatgcatattatgattgacctccttcaaacgaacggtttaattgttcaagcataggcgctaatgatgtatagtttggtattgcaactgtgaaacctttataatccatagtctttgccgttgctttataaatatcacgctcaactataattggtacttcaacctctgctaacttcaatcgcaattgaagttcttctgctcgtgtacctgtcacgatgatagcttcaatttgttgcttagataatttttcaaaatctgcatcataaatccatgaagtatctcgaccatctgcagcgttatcatttagcgaaataacatacactttttcgccttctaattgttcaccaactgataaacttgcattcattcctgcagggtttttagctaaattgatcatcgcttcttttcgttcttttttaaagtactgcatacgaccattgtctgatgtatacgtttcaaagccatttttaattgtttgttcatttaacccaagctctcttaaaactgaatatgctgctaacgcgttataagcgttaaagtcacctgcaattttcatatcatatttttcatcattgatatttaaatgtaaaaacggtgccacatcaaaacttgatatttcatattttgcttgctctcgtttgaaaccacactgacagtgataatgaccaatttgattataatgaatataatcgtattgcaataagcgaccacagtttggacaatatctactttcattcatcgtactttgttcaaattcatgggcatgtgctttcatgccatagtacacaatcgtatcacttgcgattttcaaacgactcacaaatggatcatcagcatttagcaataatttgatgcctttattactaattgtctctgcaatgttattaaccataatatcaatttcaccaaagcgatccatttgatctctaaagaaattagtaaataccatcattgaaggtgtaacttcttttaacacacgtggaatcgaaccttcatcaatttcgattaccgcaattttagtcttaggtgttgattgcatgatgaatgcagaggttatacctgcagccatattagcaccttcattattgtgtataatttgaatattatttgcttttaaagtatgtccaattaagtttgaagtcgttgttttaccatttgttccactgataaatacaatatcatcaacttgctctgctaattttcttaatatatctgtatccacttttctagcgatttgtccaggtaaatctgttcctcttttacctactgctctacttgctttacgcgccaatttcgctagatggattgccgtccactgtctcatgtgtttcctcctcaaatttccactcgcatcattataacatgacaaggcaacttcaaaaaagtttctcaatcacaaattgatacagtgtttctaaattataatcattctcatttagataattaaaaatgatatttattctcaattaaatatcgctaaatgatacattttctcaattagagcgctaaaataaggtcttaaattataattattattatttacaattgagaatgagtttgttatactaagtttaattcatagtaattttaatttacaaataagaggtgtatcaaaatgttaagtaaaaatttattagaagcattaaatgatcaaatgaaccatgagtactttgcagcacacgcatatatggcaatggcagcatactgtgataaagaatcgtacgaaggatttgcaaacttcttcattcaacaagctaaagaagaacgtttccatggacaaaagatttataactatattaacgacagaggtgcacatgcagaattcagagcagtttcagcaccaaaaattgacttttcaagcatactagaaactttcaaagacagcttatctcaagaacaagaagtaacaagacgtttctataacttatctgaaatcgctcgtcaagataaagattatgcaactatctcattcttaaactggttcttagatgaacaagtcgaagaagaatcaatgtttgaaacgcacatcaattatttaactcgtatcggcgatgacagcaatgcattatatctttacgaaaaagaacttggcgctcgtacattcgacgaagaataattaaacatcactacaatagacagataaatatcatacgacatgataggcatttgggtcacttacaataacccaatgtctatattattttgctttacggagatcactagattcattttctgaatcattgatctgcgttttttcattttcaaggctaattattgtatttttagtcatttattttttaaactactaatgttaataactctaaatttgatgttgaattaatttgaccgattttaaagcatatcatcatttactttttaatcagagttacatccaaatgatagatttcacgttataccttcacgtataatattatgtatcgtttgtaagcaaatgactaaaagtctattaatatatacatttaattaattgaaaggattgactacatgatacaagatgcgtttgttgcacttgattttgaaacagcaaatggtaaacgtacaagtatttgttctgtcggaatggttaaagtcattgatagtcaaataacagaaacatttcatactcttgtgaatccgcaagactatttttcacaacaaaatattaaagttcatggcatacaaccagaagatgttgaaaatgcacctacgtttgactacgtatttccatatatgatgcaatttattgcagatttacctgttgtcgcacataacgcggcatttgatatgaacgtcttacatcaaagcattcaaaatattggtttaccaactccaaatttaacttacttttgtagttatcaacttgctaaaagaaccgttgattcgtatcgatacggtttaaaacatatgatggagttttatcaattagattttcatggtcatcatgatgcattgaatgatgccaaagcatgcgcaatgattacttttaggctactgaaaaattatgaaaatttaacatatgtaactaatatttatggtaaaaatctaaaagataaaggctaggactaaataaaatactcccttcaaagtaagcattgtaaaaatgtaaactttgcagggagctttattttatataaagtcatatatcgtcatatttttataagttgattgttctaaattacctacagtgacaccaataagtcgaattggtacatcagggtcttttaaatcgttataaagtaaatatgcaatattataaatatcttcttcagaactaaccgaatctcttaaactcatctgtttagatagcgtttcaaattgataagttttaattttaaccgttacagttttagctgacttctgtaatttatttagacgttcagctgttttacctgacaattcccatacttttcttaaaatctcttcatcatcattcacgtctgttgcaaatgtgcgttcagtccctactgattttcttactcttgatgatttcacttcactatggtcaataccgcgtgccttgttatataaaccccgacctctttttccaaacaaacgtattaattcaaattccgttttctcatataaatctctaccgttaaaaataccattatcatgcattacttttttggaagctttacctacgcctggaaattctccaatatccaatgtcatcaaaatatcatggacattttgataatcaatcacagtcataccatcaggtttattcataccactcgctaatttagctaaaaatttgttataagaaacacctgcagatgctgttaaatgtgtcttctctagaatatcttttctaatatactgagcaattttcgaagcaggaaggtctggtctcactaattctgtaatatctaaatacgcttcatccaatgacatcggttctaccttatctgtataacttcggaaaatagacataatctgcgcagatgtttctcggtaagcaccaaaattacttgtgacaaagtatccatttggacataatttatgcgcttgtgacataggcattgctgaatagacgccgtattttcgtgcttcataggatgccgtagagacaacacccctactgcttgctttaccaccaacaatgactggtttccctttcaatttggggttatctctcatttcgacttgtgcaaaaaaataatccatatctatatgaataattcgtctctcagtcaagtgctcacctccctactaatttttacttttataacgcacaaaaatatctcaacataattatacgctgtgtacgatttttttacataaatcttgcacttagcgataactatattgagataactacaagttgttataaaatcaattgctatttaagcatgatgatgaagacgattgagtaagaaaacataggtaatctgaaataattcaagcaaattcattttgttggtattatcatattaaaatttattattgagtcggcttttgatgatacaaataaatactatcttcatcttgttgaacatatttaaaactactagatattgttaatgcaacaagcagaatatctataaagcaataagcggtatgcatactaaacataaaaataagtgatgaataaccaaataccttaattaaaataagcaagccagtacttaataagattagtggtgacagcataataattgagaattgccatttgttgaagcaagcatctgctgtttggaataagattctgtctttttttatattaaacataggtttgctatcttttttaaataaaagaaataatgctctatggataagttcatgtaaaatcaataaaataatgaatccagcaaacccatatacaagattgatgatgatattttgatcgacaaccgctgtgacacctaacgcccacttatacgtaaataaaatcacgaataacgcaataacaagttgcaagataataaaccttcgcatttgaaaattatttgtcgttaaatcaattttatgcattaccaaccctcccgatcatgacattcttattcttctttaaatatagtatacaatgtcacatttaatttaaaaagttcatatcaagaaagtaaattggctgtaataaaattttaatatacgacttctttcttcacttattaaggcgaaattttatctcaaatcatgtgcgctatttcaaattgaataatgccactgtctcaacatgtgttgtttgtggaaacatatctaccggtgttacctcttcaagttgatatttttcagctaataataatgcatcacgttgctgtgttgcgggattacatgaaatatagacaatacgcttaggttctaatgtaagcaaagtctgaataaacgtttcgtcacagccctttcttggcggatcaaccattacaacatctggtttaatcccttgtgctttccattgtaaaataacttcttcagctttcccacagacaaaagttgtattattgcattggtttatagtcgcattttgttgtgcgtcttcaattgaagaaggtactacttcaacaccgtatacatgttttgcatgtggtgccatatatagccctattgttccaataccacaataggtatctaatacaacttcattacctgtcaattgcgcatactcaattgctttattatataatttctctgtttgttcagaattaatttggtagaatgactgatcacttattttaaatgtactatctgttaattgatcaataattgtatctttaccatatagcgttatagattgacgtcccataataacattagagtggctatcattaatgttttgtttaatgcttgtcacattaggaaatgcatctaatatcttctcaacaacagcatttttttgtggccactttttaccattagttacaaaaataatcatcatttcgtctgtatgatatcctgttcttacaaccaaatgtctcattaaaccttttttcaattgttcttgataaatacttacatttaaatcttttaaaatagatttaacttcattcatcacttcttgatgttgtgaatcttgtattaaacaactttccatgtcaataatgtcatggcttctttgacgataaaagcccataataacttcattctgttcattcttaccaactggaatctgggacttgtttcgatatctccaaggatctgtcatgccaactgtatcgttaatcttagaattatcaaaatgcgcttttcgctgaaacaaattaatcacttgttcctttttcatttcaagttgtgcttcgtatgataagtgttgaagttggcacccaccacaacgttcataatatatacatggcggtgcaacacgattctcacttctcgtatttatattaagcaacttacctatcgcaaagttcttttttactttgataattttatattcaatttgttcattaattaaagcttgtggtatgaaaataggaaagcgatctatttttacaacaccatggccttcatgcgttaaatcaacaactgttcccgtttttatgtcatttttagctattgcttgcaaaattttacctccaaaatgaacaggttaggaacaaaattatgcgcttcctaacctgccattatatatttcactatttctgtttattcttcgattaaattgtcatcaacatgatcattatttattaactcttcatttacaatatcattaggtgcaaagacatctatatgacgttctagatttaagaaattcgctggtaatttaccaccatattctccatctacatttagttgtaagtctgtgaatgatgaaatattaattgcctttgctttttcataaataactttaggatgcttagtatgttctcctcttgaagctaaagtcataatatgaccaagttctgcaaggtttgatttttcaactataattaacgtaaaatagccgtcatctaacttagcgtccggcactaatttttcaaatcctgccattgaatttgttaaacctaaaaagaataataatgcttctccttggaaaacattaccatcatattcaattcttaaatctacagctttcatttgaggtaacatttcgaaacctttgatgtaataagcaaatggaccaacaatagatttcaatttactcggtgtttcataagagacttgcgtcaattgtccgcctgcagctaaattaataaagtatcgattattcattttaccaatatctactttagtagaatgaccttcaatgatgacatcaagtgcccccatgatgtcattaggtatatgcaatgcacgtccaaagtcattaacagtacccataggaatgacacctagcttaggacgattaggcttttctgcgataccattaactacttcatttaatgttccatcaccacctgcagcgattaatatatcataattttcatgcatagctctttctgcttcaagtgtggcatcacctattttctcggttgcatatgcactcgtttcatatcccgctttttctaattttattaaggcatcaggtaattctcttttaaattgctctttacctgatgtcgggttataaatgattctagcacgtttcctcatatcttatccctctacttaaaattcatatattttaacatcatctttgtttcgtctaatagggagtgggacagaaataatatttaacaaaatttatttcgttctaccccaacttgcattgtctgtagaatttcctttcgaaattctctttgtttggggccccgccaacttgcacattattgtaagctgacagaaagtcagcttctatgttggggccccactagaattgaaaaaagcttgttacaagcgtattttctttcagtcaactactgccaatataacattgtagtgcctaggacattgaatttatgacccaggctcagtcttatttcatcattcttaatatcgttaaagaccaacttgtatcttaaacaaatactatctcaatatgtacaaagcttgttatttattcagcattttttgccgttcttcattatatagacttcgtcagttatgctattttacctttaaaatgatgttgtaaatataatgttgtctttatacaaaaatgttttatacctttttattatacagtttgccttaatataattaaagctaacgcattaataaaattaatatttttaccattaacatgtacaatgaataaagttaaaagtaatatgacttctattgatataaataaaccctcgattgcatctaagtcagcaatcaagggtttattttttaaatcttcatagtttgatgatttaaattatcttttatctaattcttgttttaatagttgatttactaattgtggattagcttgacctttagacgctttcataatttgaccaactaagaagcccatagctttgcctttaccatttttgtaatcttcaactgattgttcgttattgtctaatgcttcatttacaaattttagaagtgttgcttcatcagaaatttgaactaagccattatcttccataatctgtttagcattaccacctttagctgctaactctgggaagactttcttcgcaattttactgctcattgttccgtcttcgataagtttaatcatacctgctaaattttctggtgttaatttagtatctaataattctacttgatttttatttaaatattcgtttacgccacccattaaccagttagatgttaatttaacatctgcaccgtgttcaattgttgattcaaagaaatctgacatttctttagtcaatgttaatacgtgtgcatcgtatgcaggtaaacctaattcatttacatacttagctttacgttcatctggtaattcaggaattgtctgacgaacacgctctttccaagcatcatcaatatataaaggtacaatgtcaggctctgggaagtaacggtaatcatcagaaccttctttaacacgcattaaaattgttttacctgtagattcatcaaatcgacgtgtttcttgtccgatttctccaccatttaacaattcttcttcttggcgtttttcttcatattctaaacctttacgtacatagttaaatgagtttaagtttttcaattcggctttagtaccaaatttttcttgaccatatggacgtaaagagatgttagcatcacaacgtaaagatccctcttccatcttaacgtctgatacaccagtgtattgaataattgaacgcaatttttctaaatatgcatatgcttctttaggtgaacgaatatctggttcagatacgatttcaattagcggtgtaccttgacggttcaagtcaactaatgaatactcacctttatgtgttgacttaccagcatcttcttccatgtgaagacgagtaataccgattcgttttgtttcaccgtcgacttcgatatcgatatatccattttcaccaattggttgatcaaattgagaaatttgatatgcttttggattatctggatagaaatagttcttacggtcaaacttagattctgttgcgatttccatatttagtgccattgcagcacgcattgcccagtctactgcacgcttattaacaactggtaagacacctggatatgctaagtcgataacatttgtatttgagttaggttctgctccaaaatgcgctggtgatggagaaaacatttttgagtccgtttttaactctacgtgaacttcaagtcctataactgtttcaaaatgcatgatttccactccttataatttttcataaacgtcatgtaaattgtattgtgtttcatattgataagcgacacgatataacgttttttcatcgaatggtttaccaatgaactgtaaaccgattggtcggccatttgattgtccacaaggaacagaaataccaggtaatccagctaagtttactggtgttgttaataaatcattggcatacattgttaatggatcatcaatttcttcacctaaattaaacgcagttgtaggcgctgttggaccaactactacatcataattttcgaatactttatcaaagtcatttttaatcaatgttctaactttttgagattttttatagtaagcatcatagtaacctgaacttaatgcaaatgtacctaagaaaatacgacgttttacttctttaccgaaaccttcagatcttgacattttatataattcttctaatgaatgagcttctttagaatgataaccataacgaattccgtcaaaacgagaaaggtttgacgaagcttctgatgatgcaatcacgtaatatgatggaataccaaatttagtatttggcaatgatacttcctcaacgacagcacctaaagattttaaagtttctacagcgttttgaactgcttcttttacgtcatcagctacaccttcacctaagtattctttaggtaatgcaacttttaatcctttaatatctttaccaatttcagatgtaaagtctacatcatcaactggtgcacttgtagagtcattaacatctgcaccagaaatagcttctaatacgattgcattatcttttacatttcgagtcaatggaccaatttggtctaatgaagatgcaaaagcaactaatccaaatcgagatacacgaccgtatgttggtttcataccgacaacgccacaatatgcagccggttgtctaattgaaccacctgtgtctgaacctaagctaaatggtactaagccagctgcaactgctgctgcagatccacctgatgaaccacctggtactgctttatggtcaaatgggttaactgtttttttgaaataagatgtttctgttgaaccacccattgcaaactcatccatatttaatttaccgattaaaacggcattctctttatgtagtttttccattacagtagattcgtaaattggcacaaaaccttctaacattttacttgcacatgttgtttctaatccgtttgtaataatgttatcttttatacccattggaataccaaataatttgccatccatttgatcttttgcttgtaattcatccaattcttgcgcttttttgattgcattttctttatccagcgctagaaaagacttaattgttggatcagtctcttcaattgcatcatatatatctttaacaacatcagatggtttgatttttttgtcttttattaaagttaataaattctcaaccgattcgtagcgaatgctcatcttacgcgtcctcctcattcatgattgtaggcactttaaattgtccatcttctgtttctttggcatttttcaaagctaattcttgcggaatacctttaattgctttatcttcacgtaaaacgttttgtaaatctaaaacgtgatatgtaggttcaacgccttctgtatcagcgctatcattttgttttgcaaaatctaaaatgctttctaatgtgttggccatttcttccgtttcttcaggagaaatttgaagtcttgcaagattcgcgatatgctcaacttcttcacgtgttacttttgtcattaataaaagcctcctttaagtcattcatcactaaattgtatcaaatttccaattaaaaatctaagtatttatgaggtgctactttaatttcatataaactgtataaacattatcattcgtttaccaaatcatttttttatgaaaacaacacccttttaatattagacaacccaattcaatattatgattatgcaattttaattataaaaatttgcccatatctaaaaaacacgaaagcgttttctatattggtgtacaagtatttcaaaaagaatatatttaattttcctacttttctaaacatttatctttatgtataatgttttcaagtaactaaattataaattaaataaagggagtgtttatcatgcttacaatggggacagcattaagtcaacaagtagatgccaattggcaaacttatattatgattgccgtctacttcttgatactaatcgttattggcttttacggttacaagcaagcaactggtaacctaagcgagtacatgttaggcggacgtagtattggaccgtatattactgcattatcagctggagcttcagatatgagtggatggatgattatgggtctacctggttctgtctatagcactggtctatcagctatgtggattacaatcggtttaacattaggtgcttatataaattactttgttgttgctcctagacttcgtgtttataccgaattagctggagatgcaattacattaccagatttctttaaaaatcgtttaaacgataaaaataatgtgttaaagattatttctggattgattatcgtagtattctttacattatatacacattctggtttcgtatctggtggtaaattatttgaaagtgcttttggattagattatcatttcggtttaatattagttgctttcattgtcattttctatactttctttggtggatatttagctgtatcaattacagatttcttccaaggtgtcattatgttaattgcgatggttatggtccctattgttgctatgatgaatttaaacggctggggaacgtttcatgatgtagcagctatgaaacctacaaatttaaatttatttaaagggttatcatttataggaattatctctctattttcatggggattaggttatttcggtcaacctcatatcattgtaagatttatgtctattaaatcacacaagatgctacctaaagctagacgtttaggtattagctggatggctgttggtttattaggcgctgtggctgttggtttaacaggtattgcattcgtacctgcttatcatattaaactagaagatcctgagacattattcatcgtgatgagtcaagtgctcttccatcctcttgtaggtggtttcttacttgctgcgattctagctgcaattatgagcacgatttcttcacaattacttgtaacatctagttcactaacggaagacttttataaattaattcgtggtgaagaaaaagctaaaacgcaccaaaaagaatttgttatgattggaagattatctgtattagttgtagcaattgttgccatcgcgattgcatggaatccaaacgacacaattctaaacttagtaggtaacgcttgggccggatttggtgcatcgttcagtccacttgtgctatttgcactttactggaaaggtttgacacgtgccggtgctgtaagtggaatggtttcaggtgccttagtcgttatcgtttggattgcgtggattaaaccattggcacatatcaacgaaatattcggcttatatgaaattattcctggatttattgtaagtgtaatcgttacatatgttgtaagtaaacttactaaaaaacctggtgcatttgttgaaactgacttaaacaaagttcgtgacatcgttagagaaaaataattcataagtcttaacaaattaaaaaggtactaatgttaatcaaaattatgactaacattggtacctttttattatctttaatttacaattaattactgtaaatatgaacttgcggttctttatcatcttttgtcttactaattaaagcacgtggttggttaccatctttaatacgaatttcatagttatcgattttatcgaaatatttattcgcttgttcagtaacgtactgtgtaataccaattgtttcagcttgtccatagtaatcgattggtaaatctactactaatcgttgtggctttttatcaacaaatttaactttccctactgcttgtgtgaaattagaaaaatatgattgcaaattatcattaaattgcttgaaattattatttaaattttcatcataatctgctgctgttgaagaaggtaataaagctgatttttcattgatattatgccattcattaagctttgtttgactcttttctgcagtcgcttgagtgataaactcacctggtgtgattgaatcttcacttgattgcttataaattgcaaaatgaattggtatatcttttaaatcatcattttcacgtaaccttgataatatctcactagccatttgtttaccttgctttttaacttcgctatcatctagttttttactaaaagtcggtccatctttttcttttttatagtaataaatactattcatagctaaaccaatcgtcatacctttaatattcttaccttttgtatctccaccaccataaaaatcttgctctaaaatgttagataaataggctggtgatttttctgcaatcttttcaggatctttttcaccttcgtgtgatggattaagtcctaaattttcattcgctttcttgtcttttttatctttttcagacatcttatcgatttcacgttttgtatacttaggatttaaataggcattaattgttttcttgtccaaaaattgaccatcttgatacaaatatttatctgttggaaatacttctttacttaagttcaataaaccatcttcaaagtcgccgccattataactatttgccatgttatcttgtaaaagtcctcttgcctggctttctttaaatggtaacaatgtacgatagttatcaccttgtacatttttatccgtagcaatttcttttacttgatttgaactattgttatgtttttgattatcttttccagcctggtcatccttatggttaccacaagcagcgagtataaagatagctgtaatcaataatactaatgtacgcttcatcgacatacccctctaactatttaattcattttgcttatctacaaattgttgctctgtccaaatttcaatacctaaactttgtgcttttgttaattttgaacctgcatcttcaccagcaataacgacatctgtatttttagtaacgctacttgtaactttagcaccttgtgatgcaagccatttagatgcttcattgcgtgtcatttgatgtagcttaccagtcagtactatcgttttaccactaaattcaggatgtccttcaatatctgatgttttgatacctttataaatcatattaacatgtttatcttttaatttttgaattaaagcacgaatatcttcattttctaaataagtaactacagattgtgctactttatcacctatatcatgaatttctactaattccgcttcagttaccgttagtaatcgatctatcgtttcatatttttctgctaacacttggctcgctttaacacctaaatgcctaatacctagaccaaataataaattttctaaagagttgtccttagcttgttgaatggcagctaataaattatcaacttttttctgccccattctatctaaaggtaataaatcttcttctgttaaatagaaaatatcagcaacatctttaattaattcgctttgataaagctgttgaataattttagtgcctaaaccatcaatattcatggcttgtcttgatacaaagtgaattaatccttcaacaagttgtgcttggcattttggattaatgcaacgaagtgctacttcgccttcaatacgtactaattcatgtccacaacttggacaatgggttggcatatgatatgtgacagcatcctcaggtctacgttctggaatactacgtacaacttcaggtatgatgtcacctgcttttttcactacaacactatcaccaattcgaatatctctgtcatgaattaaatcctcattgtgcaaagatgctcttgatacagttgtaccagctacttttactggttctaaaatagcagtaggtgtgactacacctgttcgtccaatacttaattcaatatctaataatttagttactacttcctcagctggaaatttataagcaatggcccatctaggagatttttgtgtgaatcccatctcatcctgttgatctaaatcattaaccttaataacaatcccatcaatatcataaggtaatgactctctttggcttgtccatttttcaatatactctaaaacaccatcgatattatttacacgcgctctatttttattcgttgtaaaacctaatttatctaactcatctaatgcttcactttgcgaacgcgcattgaaatcagtgaaatcattgacactatatataaatacgcttagctttcgttttgccgttaatttagaatctaactgtcttaatgatcccgcagcagcgtttcttggatttgcaaataactgctcatcattttttctttttcttcatttaatcgtaaaaatgaacgtctcggcatatatgcttcaccacgaacttctacatttaatggttctttcattttcaaaggtatcgcatgaattgtttttaaattttcggtaatatcttcacctgttgttccatcaccacgtgttaaaccttgaacgaagtatccatcaacatatttcaatgatactgctaagccatcaatttttaattcgcacatatattcaacgttgccaatttgttcacgtatgcgttggtcgaattttctcaaatcatcttcattaaatgcattccctaaacttaacattggcgtgtcatggttgactttattgaaagaggcttgggcttcaccgccaactctaactgttggagaatctacagtcttatactcaggatgctcctcttctattttaatcagttcatgaagtaatttgtcatattcactatctggtacagatggattatcctctacatagtattcataactgtattgatttaataaatcatgtaactcgttcacacgagacgataaatcagccatcccttaatcctcctttttttcaattggtgcaaattgcgctaacaaacgttttggcccttgtgatttaaagataatatctagttcgattgagccatttttctcgtttacattactcaccatgccttctccccaggctttatgcatcactttgtcacctacattccaatcagatgacaatacttgttttttcgttgacgttgttcgttgactaaatccgcgtttagcaaaaggttttgccttaggttgtatcgtttgtcgtttgccacttgaatgattttctaatagtgattctggaatttcctttaaaaatctggatggcatatttgactgagggcgaccaaataacattcttgatgtcgcatgagtgatatataacacctcttcagcccttgtaattgctacataacaaatacgacgttcttcttgcatttcatgatcatcttcactcttaatcgctctaatatgtgggaataaagattcttccatccccattataaagacaattggaaattcaaggcccttagccgagtgcatcgtcattagtgttacgccattttcagtatctgcctcatcaatatcagctactaacgataaatccgttaaaaagttaattaatgactgttcttctaatggggtattttcctcatagtcttttggtactgacataaattcatcgatgttttctaatctacttcgagattctaatgtattttcacgttcaagcatttctcgatagccagacttttgtaatacttcatcaactatttcatgaatttctaaaaattcttgttcttttatcaagctttggattaactcgtaaaaattaagacactcttgtgtcaccttttttgacaatccgataaaatcagcttctccaagtgcatcaaacatactgatattgttttgaagtgcatagttttgaactttttcaacagatgaaggacctacacctctttttggaacattaataatacgttgcaaactaatgtcatcattactattggcaattatacgcaaataacttaataaatctttgatttctttacggtcatagaacttttggccaccaaccattgtgtatggcatattagatttcatgaatgtttcctcaagtacacgtgattgtgcattcgttctatataaaattgccatatcttgatatttcttaccattacgttgatgcttcataatttctcgtattacaaattccgcttcatcacgttccgtcattgcttcatagtaatgaattttctcaccattcgtatttgcagtccacagtccttttggcttacgttcagaattatttttaatcacttcgttagccgcatttaaaatcgttttcgtcgaacgataattttgctctaaaaagattgtattcgcttctggatagtctttttcaaatgataagatattttgaatatcagcaccacgccaaccataaattgactgatctgagtcacctacaacacataagtttttaaacttacttgctaataatttaactaatgtgtattgtgctttattagtatcttgatactcatctacatgaatatattggaatttgttctgataatattctagaacttctggtacacgctcaaataagttaatcgttgtcataataaggtcatcaaaatctaacgcttcattacgtgacaattggcgttgatatccactataaaccgttgctaccatttgcgagtgataatctgtggcttctttttgagcatctgcaggtgttttaagttcatttttcaaattactgatcgcaccgataaacatacgaggttcaaactttttactatcaatattttcattttttaagacgtctttaataacagatttttggtctgtaggatcaattatcgtaaaattgcgttctataccaattcgatctgcatcacgacgtaaaatacgaacacacattgagtggaatgttgacatccaaataacttctgcttgatcacctactaatttttgaacacgttctttcatttctcttgcagctttatttgtaaaagtaatagccaaaacattgtatggtgagacatctttttcgtctaataaataagcaattctatgtgttaaaacacgtgtcttccctgaaccagcacctgccataattaacaatggtccttctgttgtctttacagcttcactttgctctgtattcatatgatttaataacgcattcatttactagactcctttatttttactgtttttaaagcttttttaatatctttataaataatatcaccgacgataattgtatctgcaatagctgccatctctgtcgcttgttgttctgaggaaataccgccaccataaaaaagttgcgtttctgttagatgttctgagacagcttgaacctttgatacgtcgccataaatgccactatactctaaatacataaccggtaatcgatacatatgattgaccatttgggcatatgcttctaaatcttctgttgttaaatctgtatttgctttggtatgttttgccactttgctatcagcattgcacacgacatacccttcaaatattacttcttcaaaatctatactatgtccatatgttttaagcgcttctaataatgtaccattgtgaaatacaacatctgtactgttcagtactgtaggtacaaaataaaaatcaaaaccaggcattacactttcgatgtttgatatttcaagtactaaaggcaatgggtatcttcttaccctgctcattaaatgaatgacattatcttcagtaacgtcatcagttccaccaatcataattgcatctgtttgagacatacaaatcgcatctaaatcatcatctgaaatatgtttagctgggtctaatttaaaaatatggcgccattttttaatgtcatacattttccgaaactccttttttaacatacatatgattatagcatttttaagtgtcgagttctaaagacttaatatgaaatttaagttcttttactctgtaaattttttcgtgaaaaaacaatgattatctaccttattagtgcagatagataaccattgtttatcgttcatttattattcatttgtttcaatattcatacgatctaaaatcattgtataagcatcattaccccattgtaatgaacgcttcactctagaaatcgttgcagtcgatgctccagattcttgttcaatcgttgcataggtataaccttgcttaatcattttagcaacttgtaatctttgagacagtgattgaatttcatttacagtacacaaatcatcgaaaaattggtaacattcttctctattttctaacgttagtattgcatcaaacaattcatctaacgctgcacctcgtaatttttcaatttgcatatcgaaacaacccctataattttattctttatgtcattttaacgcattaatctattaaagtgtagcgatttatattttattaaatctgaatcgttactttatttaattttatgctagtccagcgcgttcgaaaatagtgtcaacttgattcaaatgatgtttaggatcgaaacattcatccaattcttcttttgttaaaacacttgtaatagactcatcttgttcgattaattcacggaaaggtgttttcgtttcccaagatatcatcgcttttggttgtactttgtcgtatgcttcttcacgaaccatacctttattaattaatgctaataagacacgttgtgagaaaatcagaccaaatgttttatctatgttattacgcatattatcttcaaatacagttaaacggtccacaatatttgtgaaacgattcaatgcataatctagtgctattgtaacatctggtaacataatacgctcagcagaagaatgagaaatatctctttcatgccataatggcacattctcataagctgtagtaatataaccacgaatgactcttgaaatacctgtgatattttcagaaccaattggatttcgtttatgaggcattgcagatgaacctttttggccttttgcaaatgcttcttcaacttctcttgtttcggttttttgaaggttacgaatttcaacggcaaatttttctagtgacgtcgcgattaatgctaatgtcgcaatatagtatgcatgtcgatcgcgttgcaatgtttgcgttgatacaggagctgtgccaatacctaaatgtttacacacataactttctatttcaggaggaatgttagcaaaagtacctactgcaccactcattttccctacttcaatttcttctcttacttgtttgaaacgttgtaagttacgttgcatttccgtgtaccacaatgccattttgacaccaaatgtagttggttctgcatgcactccatgtgtacgtcccatcatcaatgtatatttataattttttgctttttcagctaaaacgtcgataaatctttctaaatctttttcaataatgtcatttgcttgtttaataacgaaacttaaagctgtatctacaacatcagtagaagttaaaccataatgtacccacttacgttcttcacctagcgtttcagaaacttgtctagtaaaggctacaacatcatggcgcgtttcttgttcaatttcttgtgcacgttcgacatttacctttgcgttttgacgaattttttgtacgtcagctttcggtatatgtcctaattcactccatgcttcacatgctaaaatttccacttctaaccatgcttcatagcgattttgatcagtccaaatattagacatttcttctctagaatagcgttcaatcatttttttaactcctatcgtatgtatactcgaattttcaaaaacagaacatttttaataaaaataaacaaaaagttcgtttttaactctactcttcacagtttaacagaattggttataaatgtataaaaaatttccgtatattctcattctattttattttttacattaatacaattatctatggcagattaatactgatttctaattgtaaatgttcgcaatactttaatctaattggtatttataatgatccattgagaatatatttttgcattttagtttttctcccctcaactacactatccaactttttattacaattaggacaatcaatagctttagtaataccagattttattcactttacttctcctattgtatggaatttctaataatctactttacctagtttcataatattccttcttacatttccataatatgttttaaaattattcacttctaatataacaaactttctactcacaaaaagaatatatgttctattgcataggtatggcattttaaatataagacattaatattgaactccagaatcgtataaatacgaaactgattatagaaaaatacgcagagattttcttaatagtaaatttttatagaaagacataaattgactacgcttctttcaaaatcgactaatatattttcatgaaactttcgatcatattaattattgaatgagatgtttacaatttagtaaataagctactaaattattacataaactgataatgtgtaaaaattaaatattttttaaacatagattaaaaatttatattgaaactcttaactaaatttaatataattattttataataaaataaaggagtttttatatgaaaagaaactttccaaaattaatagctttaagtttaatactttctttaagtgttacccctattgcaaacgctgagagcaattcaaatatcaaagcaaaagataagaagcatgtgcaagttaatgtcgaggacaagagtgttcctactgacgtacgtaatttagcgcaaaaagactatctttcttatgttacttcacttgataaaatctataataaagagaaagcctcgtatacacttggtgaaccttttaaaatttataaattcaacaaaaagagtgatggtaattattattttccagttttgaacactgaaggtaatatcgattatatagttacaatttcaccaaaagtcactaagtattctagttcatcttctaaatacacaatcaatgtttctccatttttatctaaagccttaaatcaatataaagatcaacaaattactattttgacaaactcaaaaggttactatgtggttactcaaaatcataaagctaaactagtactaaaaacaccacgtctagaagataaaaagttaaaaaagaccgagagtatacctactggcaataatgtaacgcaactaaagcaaaaagcttctgtcactatgccaaccagtcaatttaaaagtaataattatacttacaacgagcaatatgtaaataaacttgagaatttcaagataagagaaactcaaggtaacaatggttggtgtgcaggctatacgatgtctgcattactaaatgcgacttataatactaacaaatatcatgcagaagctgtgatgagatttttacacccaaacttacaaggacaacgattccaatttactggtttaacgccaagagagatgatttattttggacaaactcagggaagaagtccacaacttcttaatagaatgactacatataatgaagttgacaatcttactaaaaataataaaggaattgctgttttaggtagtagagtagaatcaagaaatggtatgcacgcagggcatgccatggcagttgttgggaacgctaaattagataatggacaagaggttataattatatggaatccatgggataatggttttatgactcaagatgctaaaaacaatgttattccagtatccaatggcgaccattatcgatggtattcatctatttatggttattaaaatttgtattttagaaaggtaaataatattatggaacaaattgaattatttagtattgataaattcaaatgtaattcagaggctaagtattatcttaatattattgagggagaatggcatcctcaagatttaaatgatagtcctttaaaatttattctcagtacctcagacgattctgattacatttgcaaatatataaatacagaacacaaacaactcacattatataataaaaataatagctcaattgttattgaaatatttataccaaatgataataaaatactactaacaattatgaacacagaagctttcggaacttctcctagaatgactttcattaagcataagtcataagactatctagatatgattaagtaaactattaatcttattaaaggtctctaggaagaaaaaatttcatgcgatgagattgttttagaaaaagcgacgatatatataatctaacaataatttttaaaatattaagaacccacagcatatgctttatatagcttgctgggggtttctcatacaatatggatcgagcatcttgcatgtataaacaaataggctattcaaagtaaaattactcaaactttgaatagcctttcctcttcaaatagtctttatttaaattggattatgttattggattttcttacctacaaaaatgatttcttgatgtgatacttcaaccgtgccatctttttgctcctgaaacacgggtttttcaagacgttttaccggcatatacccttgcattttcattcgtgacaaacaatcagcaattgtttcattctcatttactttgaatttcatgttctactacactttccagttcttctggttcataatctttaagctttctacgacgaatgcctttagtccagaatccaccatgtatgtttcgaggttcatacgcaatgataaatgctttcggatctaaattttttatcgtatccatcaatttacgttcatattttcttggtgttaaaatttgcatcaccatacgactaccatctctaccaaacgcagcatagtgcgtaacgccatatcctaaatttcgaagttcattcggtaaatctaactcatattctgctgaagttacatttacaactgtataacctaatgccagtttttcttctattttcataccaacaatgatacctattgaaaaaccaaatgcgtaggcaataatattttgaatatggtctaaattagacataaccaaacctaaaccaacgatataaactaatacttctaaaaaactaactgatgcagcaatataacgataacctttcaacgttaaaattgttcgcatcgttaaaaacgttacataacaaacgttaatgataaatatagttagtaccattaaccatggattttctgttacgaatgacataaggcgccccactctctttcaattacactttaaataccaaactgcttcaaactaaccttaatgaatgcatattaatataatatagtacgaaaactctcataaataaatagcgaatttgtcataaataaaaatttattctcaaatgaacatacttactttagttcatacactttcaatttatacactgaagtagtctagctgaatgtggtttaatgctattaattctaactcatatttaatttaagtcacacgttagaagaaaaaattaaattaggattttggccacgtgtatcttgtatatgcaagttcacgtttgtgtgcatttcgtatataatgattttcaattactttttgttcttctggcgtaactggcttaccttctaaataattatcaatcgcctcataagttacacctaatgcatcttcatctggaagctgtggtttatcatcttctaaatcagcagttggcgttttttcatataattcctttggcgcaccaagatacgctaataattgacgaccttgtcgtttattcaaaccaaatataggtgcgatatctgcagcaccatcaccgtacttcgtataaaaaccagttatattttcagctgaatgatctgttcctactacaataccttgtcggtttgaagcaattgaaaattgtactttcatacgttcacgcgctttttcatttcctttttggaaatctgtaagaacaatacccgcttcttttaatgattgcacactttgatcaactgcaggcttaatattgactgttactatttcatctggttcaatgaatcgcaaagcttggtcaacttcatcagcatctttttgaactccataaggtaatttaactgcaataaacgtacaatcaatgccttcttcacgtaattcgttaacagacatttgtactaattttccaactaatgtagaatcttgtcctcctgaaatacctaacactaaagattttataaatgaatgtgattgtacataattttttataaattgctttaattccataatttcttcagcactatcgatacgctttttcactttcatttcttgtacaataacgtcttgtaatttactcattatcttcttccatctccttaacgtgttccgcaacttcaaaaatacgtttatgtttattatcccaacatgccttgcttaaatcgactggatattcttgtggattaaggaaacgcttattttcatcccaaatagattgtaatccttgtgctaaatattcacgtgattcatcttctgttggcatttgatatactaatttaccattttcataaatattatgatgcaaatcaatggcttcgaaagattttataaatttcattttataagtatgcactggatggaataattttaaaggttgttcatcgtatggattttcattttccaaagtaatataatcgccttctgccttacctgttttcttgtttataatgcgatatacatttttcttacctggcgtcgtaaccttttcagcgttatttgataatttaatacgatcactatatgaaccatcttcattttcaatagctacaagtttatatactgcacccaatgctggttgatcgtatcctgtaatcagctttgtaccaacgccccaagaatctacttttgcaccttgtgctttcaaactcgtaatcgtttcttcatccaaatcattagacgcgataattttagtttcagtaaatcctgcttcatcaagcatacgtcttgcctctttagataaataagcgatatctccagaatctaatcgaatacctacaaagttaattttgtcacctaattcttttgcaacttttattgcatttggcacgccagattttaaagtatggaacgtatctactaggaacacacaatttttatgtctttcagcatattttttgaaggcaacatattcgtctccataagtttggacaaatgcatgtgcatgtgtaccagacacaggtataccaaataatttacccgccctaacattacttgtagaatcaaagcctccgatgtaagcagctctagcgccccacaatgctgcatcaatttcttgcgcacgacgtgtaccaaactccattaatttatcatttgatgcaatttgacgaattctacttgcctttgttgtaattagtgtatggaaatttacaatgtttaataaaattgtttctattaattgcgcttgaatcaatggtgcttctacgcgtaacaatggttcgttaccaaagcataactcgccttcttgcatcgaacggatgcttcctgtgaattttaaatcttttaaatatgataagaaatcatccttgtagccaatagactttaaatattccaaatcagattctgaaaatccaaaatgttctataaaatcaatgacgcgttttaaaccattaaaaacagcatagccactattaaatggcatttttctaaaatacaaatcaaatacagccattttttcatgaatattatcattccaataactttcagccatatttatttgatataagtcattatgtaacattaaactgtcgtcttctaattggtacacttgtatctctccaatcgacctaaatattttcttacattttatcataattcatttttttatatacataagagccccttaatttccatacttttaattaaaatcaaccaacaatttaatgacatatacataatttttaagagtattttaataatgtagactataatataaagcgaggtgttgttaatgttatttaaagaggctcaagctttcatagaaaacatgtataaagagtgtcattatgaaacgcaaattatcaataaacgtttacatgacattgaactagaaataaaagaaactgggacatatacacatacagaagaagaacttatttatggtgctaaaatggcttggcgtaattcaaatcgttgcattggtcgtttattttgggattcgttaaatgtcattgatgcaagagatgttactgacgaagcatcgttcttatcatcaattacttatcatattacacaggctacaaatgaaggtaaattaaagccgtatattactatatatgctccaaaggatggacctaaaattttcaacaatcaattaattcgctatgctggctatgacaattgtggtgatcctgctgaaaaagaagttacacgcttagcaaatcacttaggttggaaaggaaaaggtactaattttgacgtgttaccactgatttaccaattacctaatgagtcagttaaattttacgaatatcctacttcattaattaaagaagtacctattgaacataatcattatccaaaattaagaaaattgaacttaaaatggtatgcagtccctatcatttccaatatggacttaaaaatcggtggcattgtatatccaactgcaccctttaacggttggtatatggtaactgaaattggcgtacgtaactttattgatgattaccgttacaatttactagaaaaagttgcagatgcgtttgaatttgatacacttaaaaataattcatttaataaagatcgagcacttgttgaattgaactatgctgtgtatcattcctttaaaaaagaaggcgtatcaattgtcgatcatttgaccgctgcaaagcaattcgaactattcgaacgtaacgaagcacaacaaggtcgtcaagttaccggaaaatggtcttggctagcaccgccattatctccaacattgacgtcaaattatcatcacggatatgacaatacagtaaaagatccaaactttttctataaaaagaaagaatcaaatgctaaccagtgccctttccatcattaagttagtagaggtgtagcatatgcaattatattatttaggccctaaaggtacattttcatatttggcttgtcgtcagtatttttctgaaaatgaagcaacttttcaaccaaagtcaaatttatttgaagtcatcaaggcagttgcagatgatgacacatcgattggtgttgtccctattgaaaattctatagaaggaacaatcaacattgtggcagatgcacttgcacagcaagatgtctttgcacacggtgaaatacgtttagatattaactttgcattatatggtaatggaacagattccatttctgatattaaaaaagtgtattctattgcaccagcaatcagtcaaacaacaaattacatacatcaacatcaatttgactatgattatgtcgacagtacaattcaaagtttgactaaaattgaaaatggcgttgcagcaattgcacctttaggtagtggcgaagcttatggttttacacctattgatacacatattgaagactatccacataacgtgacacgttttttagttataaaaaatcagcagcaatttgatcaaaatgcgacatcattgatgtttttaattacaccaatgcatgataaacctgggctgttagcaagtgtgcttaatacatttgctttgtttaatattaatttatcctggattgagtctcgtcctttaaaaacacaattaggtatgtatcgatttttcgttcaggctgattctgcaattacaaccgatataaagaaagtcattgctattttagaaaccttagatttcaaagtagaaatgattggtgcttttaattaaactttattttctaggttctacaatttaaataaaataaagagtcaaccaaggattaaaataggaatccatccttggttgactttcttttgtttgtattgtttttacacgatgctgcggtatacgtttcgttaccactcgttcaagcaattgctaatgtaaccttttatttttcgttctaatctgcaattactatttcaatggcagtggttgatttatatcaatacctaaaactataggcattacataatacacaactaaaataataattattgcactgattaagtttacccagaatcctactgatgccatttctttgatagatattttacctgaaccaaagataattgcattcggtggtgtccctactggtaacatgtatgcacagttagccgccatagctgcaggtgccataagtagtaatggatgcactccaacagcaacagacaacgttgctaaaatcggtaaaatcatcgttgcagttgcagtattagatgtcacttcagttaaaaataagacaaagatcgttatgacaattacaataagaatcggactaacaccatttaatgatttcaactgttcgcctaaccattttgctaaaccactttcagaaatacctttcgctaatgctaaaccgccaccaaataaaattaatacaccccaagggagctcttttgcaacttcccagtcaatgatacggcgatgtttttcggtatttttagctggaataacaaataataatattgatataaaaatagcaatcgtaccatctgcaacggatgacgtaacttcccattttttcagaagaaactctcttgtaatccataataagctggcaagtacaaagatagtttgtactaccttttcttcatacttcattttgccaagctcgtctaacttttgtttaattaacgtctgaccaccaggtaaatatttcaaatcatgtctaaacgcaacatatcttaaatagagccaagtaatacctaacaaaacaatgaccgttggaatccctacaatcatccatttagcaaaactaatttcatgtccaaaatgttgcatgtattgtccttttaaaataattaatggcggggttccgattaatgtacccaagccaccaatcgtacctgcatagccaattgctaaaactagagatttttcaaacttttgaatacttgtttgattcgtattggcttcttgtaaatcatgtgcttccttaataattgctaaaccaatcggaatcataatcattacagctgcagtgttcgatacaaacatagataagaatcctgttgccaccatgaatccaagtaatatttttgaagtgcttgcaccaatcaaattaataattgtcaacgctactctcgtatgtaaattccatctttccattgcaattgccaaaataaatccacctaaaaacaaaaagataatatcattgccatattcggatgatacttgttctggtgtaagtatatgacctaatggtaataacacaattggtaataagctcgttgctgcaataggaattgcttcagtaatccaccaagtcgcaatccataaagtaatcgctaaaacatagacgcctttccaaggtaagtcttgtggatgaaagaataataatgttaataggaaaagtaatggacctaatattagtccaataagttgtcccgcactaaacggtttctttttctttgattttgaaaagaatgttaaataccttttcgatatcattgattgatgttgattgaaataagccataaatttccccctcatgatgattatgacaagctacttcaactcactatattaaagtatagaaagttgtctatcttgtattatcattaccgtcaaaataccccttttatcagataattgggtttattatagcatatttataccgttttatgaatgcgctttcaaaaattatctactattcttaatcctaatgtcatgcgaaactttttacttttttatttcatctacattgattgtagtaacttgaatacccgcttcaacaggacttaaaaacactgtatcaatatcttctaaatgaattgattgagtcgaattattgaatgaattcccaacgattaatacatctttatgtttaacattattataattacgtacatgtatcgcatctttagacattgatcctttaaattcatttccaattatattcatatttatgcctgcttgggaacctaagtcttttcctgtcatcacatctgctgcatttttaccatctctaactcctaaatatctaataccaccctcacagttaataaacttattattaataatgaaagcatctttatacttcaagggagttaatgcataaccttgtatatcttcaaatatattatttctaatatgaatattctcatagtaacgattatgtctacttgcatgtgagccaatagcacgattccaacttcccatttcgggcaattctgaaggtccaaaataacaatcttcgataacgacatttttcgttatcgtaccatctgtcgttccgaattttggaaaagcaccaggtacttgaatgtctaattgtattgcttcagaataaaagcgttcgccactatagtctataaatccttcaaatgaacagcttttaatatagagtccattaatcccgcaagcatcaattgcatgaccactcactacattcttaatagtcacacctattaattgaatatcttcagcatgcccaatgcacatagctgtattgttataaggatacgatacgccattcatatcaaacttgccgcctttaatatgaatatgactgtgtccattataaccacgataaaaaccaaagcgatgaccattttttaataaaggaccagaatgacatcggcgtaaaatagtttcattatccaacaaaagtgttgtattgccatatatcgttaatggtttgcaaatatcatacgtccctttcggtatataaactgtcgttggtttacatcttccacgatttaacgcatgttgtattgctcgagtatctttagttttgtttatgcctgttaacccataatctttcatattgatatacataaatcgtcatcctttgtctattttctaattactcatatattaaccaattattcaaattataatcgtgttaggttgatttaacagatagtcataaatctcgtgatgccatctattagcatttttatattcaaaacatcaacacttgatattagttctaagtttgtcacatttagtattctattacagctattttaaaactatcgcaaaaacttcttatattatttgttgattgcgtgatttgctcttccaaaaaagttgattaatctatatacttaatctatatttatatattaaccattagggttaaaaattactctagcatttatgaatagatgggagtttattttattattatataggagagatgttgaatgacacatcgcgcactattagttgttgactattcatatgactttatcgcagatgacggcttactaacatgcggtaaacctggacaaaatattgaagattttattgtttctcgtatcaatgactttaattattatcaagaccatatattctttttaatggatttacattatttacatgacattcatcatcctgaaagtaaattattcccaccacacaatatcgtagatacaagtggtagagaattatacggtaaagtaggtaaattatacgaaacaattaaagcgcaacctaatgtacatttcattgataaaacgcgctatgattcgttctttggtaccccgcttgatagtttattgagagaaagaagtattaatcaagtcgaaatcgttggtgtatgtaccgatatttgcgtgttacatacagcaatttctgcatacaacttaggttataaaatttcagtacctgctgagggagtggcttcatttaatcaaaaagggcatgaatgggcacttgcacatttcaaaaactcattaggtgcagaggtagaacaacacgtttaaatcgtgctaaaataattataaagaatacaatttacaagggagatatttgacaatggctaaaacatatattttcggacataagaatccagacactgatgcaatttcatctgcgattattatggcagaatttgaacaacttagaggtaattcaggagccaaagcataccgtttaggtgatgtgagtgcagaaactcaattcgcgttagatacatttaatgtacctgctccggaattattaacggatgatttagatggtcaagatgttatcttagttgatcataacgaattccaacaaagttctgatacgattgcctctgctacaattaagcatgtaattgatcatcacagaattgcaaatttcgaaactgctggtcctttatgttatcgtgctgaaccagttggttgtacagctacaattttatacaaaatgtttagagaacgtggctttgaaattaaacctgaaattgccggtttaatgttatcagcaattatctcagatagcttacttttcaaatcaccaacatgtacacaacaagatgttaaagcagctgaagaattaaaagatattgctaaagttgatattcaaaagtacggcttagatatgttaaaagcaggtgcttcaacaactgataaatcagttgaattcttattaaacatggatgctaaatcatttactatgggtgactatgtgactcgtattgcacaagttaatgctgttgaccttgacgaagtgttaaatcgtaaagaagatttagaaaaagaaatgttagctgtaagtgcacaagaaaaatatgacttatttgtacttgttgttactgacatcattaatagtgattctaaaattttagttgtaggtgctgaaaaagataaagtcggcgaagcattcaatgttcaattagaagatgacatggccttcttatctggtgttgtttctcgaaaaaaacaaatcgtacctcaaatcactgaagcattaacaaaataatactatattactgtctaatcatagacatgttgtatttaactaacagttcattaaagtagaatttatttcactttcaatgaactgttttttatttacgtttgactaatttacaaccttttcaatagtagttttcattcctttagctatcctaacccacagattagtgatttctatacaattcctcttttgtctttacattttcttaaaatatttgcgatgttgagtataaatttttgttttctccctacctttttcgttatgattaaagttataaatattattatttacacgattcatcgctctattttcaactttcaacatatataattcgaaagaccatttaaaattaacggccacaacaatcaaatcaattaatcactttttccaaaataatcatataaggaggttcttttcattatgaatatcattgagcaaaaattttatgacagtaaagcttttttcaatacacaacaaactaaagatattagttttagaaaagagcaattaaagaagttaagcaaagctattaaatcatacgagagcgatattttagaagcactatatacagatttaggaaaaaataaagtcgaagcttatgctactgaaattggcataactttgaaaagtatcaaaaatgcccgtaaggaacttaaaaactggactaaaacaaaaaatgtagacacacctttatatttatttccaacaaaaagctatatcaaaaaagaaccttatggaacagttttgatcattgcaccatttaactatccttttcaactagtgttcgaacctttaatcggtgctattgcagcaggtaatacggcaattattaaaccatctgagttgacaccaaatgttgcacgagtgattaaacgattaatcaatgaaacatttgatgcaaattacattgaagttattgagggaggaattgaagaaacgcaaacgttaattcacttaccttttgactatgtcttctttacaggaagtgaaaatgtaggcaaaatcgtttatcaagctgccagcgaaaatttagttcctgtgacattagaaatgggtggtaaatctccagtcatcgttgatgaaacagcgaatattaaagttgctagtgagcgcatttgttttgggaaattcactaatgccggccaaacatgtgttgcaccagattacattttagtacacgaatctgtaaaagatgatttaatcacagccctatcaaaaacgttgcgtgaattttatggtcaaaatatacaacaaagtccagattatggccgcattgtaaaccttaaacattatcatcgtctgacttcattacttaacagtgcacaaatgaatattgtatttggtggtcatagtgatgaggatgaacgttatatagaaccaacattgttagatcacgttacaagtgattcagcaattatgcaagaagaaatttttggtcctatcttaccgattttaacgtatcagtcattggatgaagcaatagcctttattcaccaaagaccaaaacctttgagtttatatttatttagcgaagatgaaaatgctacacaacgtgtaataaacgagctatcatttggcggcggcgctattaatgatacattgatgcacctagcgaatcctaaattaccatttggtggtgttggcgcctcaggtatgggacgctatcatggtaaatattcattcgacacttttacacatgaaaaaagctacattttcaaatctacacgattagaatcaggtgtccatttaccaccatataaaggtaaatttaaatacatcaaagctttctttaaaaattaatttttgagccaaaaataaaccatgcttccataatttgatgttcttgaaaacaataaatttcaaggtatacacaaattttttggaaacatggttttctttttatcatgattaattaaagattaaaatatgacacatacaccttcagatgctacacgagtgttatcacatagcgtaattttacctgtttctttatttctttcgaaaacagttacaactgaatctccttgctcatgagcacaaactaaaaggtcatctgatgaggcaatattaaaatctcttgggaattgaccaccactttcagtaattgttactagttctaagtgttgaccattatcaagaactttaaaaattgcaatgctatcatgccctctattagatacatataagaattgttgatcatgagataaacgcactgctgcaagtttagtatctccatcaaagttttcaggaattgttaaatgacgctcgagctcttcaaatttaccgtcattatattctgcaacactcacagtatttgataattcgtgtacgacataagcaaattttccattatcatgaaattcaatatgtcttgtcccatcactatctttaaataaagattctttataaaattcaaacccgttgtcatcaaatttataagtaacgatacgatcagcacctaaatctgttactgcaacgtacttaccatctggagtttgattaatataatgtgcgtgtggatgatcttgtctttcatgtgtacctgttggaaaatcatgcgcaagttcttgaattagacgtataatttcacctgtgtgcgtgtttaattcatacatacgtatgatgccagcaccatataccgcttcaaataaatatcgtttatcttctgaaatcgatacataacaacctgtaccagcttttgaagacaaacatttatttaataaatgcaattcaccattgtcatcaattttcaaactcgcaacaccgcattgttctccttctttgttgattccatataaaacttcattattacgcaccaaatatgtagacgcttctaattcaaatcctgtttctaataaatcaatacgtgactgattttcgtttaattcaaagcgataaatccctttaccattctttttagtgtaagaaccaatatatccatttgtcattacttttacccctccatgttagtcttattttcattttattaaattttagctagaattaacaatcatttatcatttccttaaagctaaaactatttaactactttaaaagaactatttgctgtgatatgtcattattcgattttaattaatccctcttttttacttacacgagcattaattattaacgcgtttatgcttccacaaaatttttgttgcaaaatagaacatatgttcgtataatgtaattatcagattggggtgaattaaggatgacaagttatgaagaagaaactgattatcgtaacgttccaagagaattactagataacaatatacctatgggaagaggcatgattaaatgggctccgtttattatatgtactaatctcataaaaaatctaatttaatagggttcaaacataatttatatatgtattatgtttgaaccctatatctatttattttttactaatatcatttaaaatgtctcgcaattcttcaatttctttgttatttaattcttcatttttcgcaaaattaagcactaaacttttcatatcccctccatacaatttattaagaaaggttttagcagttttcattttaatatcatcttctttaataattgatgagtaaaaataaatattattatatttatatcgttttataatctcttttttatatagtcttgtaattaatgttctaatcgtcttatcgctaacttctttatttttttgaatctcaactacaatttcattagctgatactgattttttattccatattatattcataacatcccattcagccatagatatttcaacttgcttattggccatttaaaacacccatttcttttaatattttttcatttattaatttagcattttcaccagaggctttttcatctgataaatgtgtagaaaaataatacttatcatgatttgtaattacgtaacctacaaaccacccattattatatttcccgtttactatacctgtacctgttttcccatacaattcataattttcattttttctaatcaataacgaagaagataattgtttcttttcatttttactaaaatggttattttgttccatcatattttttaaaactattacttgttcaagattagatattttcaaactatcttccaaccaataggctttataacttcccaaatttttattaccataatttaattgcttgagttgatcagaagtatagttctttgataattgattactaatacgttcgaagtaccaattaactgagttttgtattgccgtatttaaatcttgatccttattccaagaatcgaaaggataatgattatgattccatgacatacgtgaatttttatcacttataatatgacggtcaagtccaaacagtgctaaataaattttgtaagttgaatcaggagaatatctttttctactttctttttcattataaatatagtatttgtctttcttcatgctgtacataacgaaagatccactatttgaaccaaaatttttactttcatctaaaatttggtaatcgctttgtaagggctttttataattataatcagttaaggattgccccattaaaaactggctttgaattatcatgataaaaaaagtaaaaatacaaataaaaattagaattaattttgactgcttcttcagattggcttcttttatattaattaatcttcttttgagtaatgattttttaccattaaatgaatggcttaatatatttttgttgaaaaatgaggtttttaatacggaatccataatagcttccgcataagacttaaattcatatttgttaatattattaaggacaaatctatcggcttctacttcattgtcatgaatcatctttctttttacaatttgtattagtggattataactcatagcaatagaaaaaatatgaaagataattaaatgcaaagtatctctgtttttagcatgagcatactcgtgcaatattatatattttagttttttgtcatttatacttttaaaatataaactgggaatcaaaataatatattttccataccaaaaagttattggagaatgaatagattctgcttttcgaatcacaatatttcttttatattgatgattgaaaagtatcttgtttattttatctttttctttttcatttagataaagtgactgtttctttaaatacttaagatataataaagaatttaaaaatttaaaacttaaaataataactaaaactatccaaataactgtgcagatattatctattgaatcccaattaaacttatggatgtctgttgtaaactcatgaacaggtttagtggtatttatgttaggattcaaattgtgtgaattactttcaactgtgggctcttgattattcaaattattaaatttaaaaaaagagaatttaatagggatgaaaggaattaatcctgcaagaagagttagataccaaactttataatttaacatataattaaaatagcgttttaatatgtacctaaaaaataataacaatagaaatataaaacaaaagcttactatgctcattattaataacttagccatttcaacaccttctttcaaatatttataataaactattgacgcgaatattacaattgtaatattattgatttatagaaattacaactgtaatattggagggtatattttgaaaaagttaatacttttaattgcaattgctttagttttaagtgcatgtaattcaaccagttcacatgctaaagagttaaataatttagaaaagaaatataatgctaatattggtgtctatgcattagatactaaaagtggtaaggaagtaaaatttaatgccgataagagatttgcctatgcttcaacttcaaaagcgataaatagtgctattttgttagaacaagtaccttataataagttaaataaaaaagtacatattaacaaagatgatatagttgcttattctcctattttagaaaaatatgtaggaaaagatatcactttaaaagaacttattgaagcttcaatgaagtatagtgataatacagcaaacaataaaattataaacgaaatcggtggaatcaaaaaaattaaaaaacgtttaaaaaaattgggagataaagtaacaaatccagttagatatgaaatagaattaaattactattcaccaaagagcaaaaaagatacttcaacgcctgctgctttcggcaagactttaaataaacttatcgcaaatggaaaattaagcaaaaaaaataaaaatttcttacttgatttaatgttaaataataaaaacggagacactttaattaaagatggtgttccaaaagactataaggttgctgataaaagtggtcaagcaataacatatgcttctagaaatgatgtagcttttatttatcctaagaaccaatctgaacctattattttagtcatttttacgaataaagacaataaaagtgataaacctaatgataaattgataagtgaaaccgccaagaatgtaataaacaaattttaatagtctaaatgtactacaaaaactgatataattctatctttcataaaacttcataatatcgaaggagtccgggacataaagtatctggataagtgaaaaaagacaatttctattgaaataatatagaaattgtcttttttataatttttttgattattttcagctcgttgagctgttacttttcttatattaagtgccattagcacaaatcctagttctcttttggctttatttatccctcgaacggacattcgagtgaaacccaaaatagccttcataaatccaaaaacaggctccacatcaatttttctttgactgtagatggtttttatttttggttctgaaagctttttattaatttgggctttaaaatattcccaattataatttttcattatttttttattcgtttttgaattgtatttcatgcattggtgtctcagagaacattctgaacaatcatcacattcatataatttgaagtctctcttaaacccatatttatcatggcgatatgcatatcttttaaaacccaatcgcttattgtttggacaaatatattcatcgttaatttcgtcataatcccaattttgagtgttaaagatgtcgcttttatattttttagttttatcttttataaacataccgtaggttataagtggtattcgattaaaatcatctataattgccatataattgggttcgctaccataacctgcatcagctacaatatattcaggtaaatgaccgtaggtatcttgaattgaatttaaaaatggtatcatcgttcttgtatcagtcggattttgatgcacattataagataaaacgaattgagaatttgttgctatttgtaaattataacctggcttgagttgtccatttttcatatgatcttctttcattctcataaatgtggcatcatgatctgttttagaataactatttctatcctttaaaatagatttttggacgtcgtatttatgctttcgcccagagtaatcattaatttgctttttatattgtttaattttagttcttttgagccgtatttgttttcttattttagtacatttttcattatcgatatgttgatttaaatcttcgatttctttatccaaatgactaccaatcaaatctatttcttcctttgttaagtcattatcgtgatcttttttaatctcaggtatgattttatttgttaccaattcatgatagagtgctttagaatcttcattcatctttgtctcatggttttgaatactctttttccatacaaatgtatatcgattggcatttgcctcaactttcgtaccatcaataaaaatggtttgatcatctataagatgttgtttcaaacactgactatgaaattgaataaataatgattctaataaagcatctacttttggattgactctaaatcgattaatcgttttataagaaggcttttgattttgtgataaccacatcatccggatgctatcattaagtaatttttctatcttacgtcctgaaaacacagattgtgtgtaggcatatagaatgacttttaacatcattttgggatggtatgaggttgcaccacgatgatgtctgaattcatcgaattcagttttaggaattgtttctacaatatcattgacatgtcgtgaaatatcatttgtggggataagaactgaagtttccaatggtagagtaagttgagtcatgttataatctttatacataaggcacctcgttaatttagtttagtgacatttattaaattatacgaaagtgccttatttttttaaagtatttcaatgtaaaattacatataaatacaaagtattttggcgagactcttgagggaacaggacaagctgaagactacaggctgaagctgtcccctaagaaagcgagccaacaatacgtagtattgtaaataaagaggttcttcatcttttatggtgggaaggtaaaacttcctgctttttttaatacacaaaaagcgcaattgcctctataatttaaagtgaccaaacccaaactaaaggagacaagtgcgcctatgtgtaatgataccttagaattactaagaataaaagatgaaaatataaaatatataaaccaagaaattgacgtcattatcaaaggaaaaaaagcaacagtggttaatgctgtactaacgtataagccttcggcctgttattgttgtggagttaaaaatgaaggacaaattcataaacatggtaagcgtgtttctcgtattactttacttaaaactcaagggtataacacatacctcaacttagctaaacaacgttttaaatgcttagaatgcaatggcacttttactgctaaaacgtcaattgttgatgagttcgtagttttatctcaagatgtgttactcaaaaagttatagaagaagctactaaagttaaaacagagattgatactgcagaagataactgtatctctccatctactgtaagtcgtattagaactaaagcggctaattcattacgaattaaaccctttaattgtttgccagaacacatcgctatggatgaatttaaaagcgttaaaaatgtaactggatcaatgagtttcatttttatagataatgatactcatgatgttatagatattttagaaaatagaactacaagattcttgcgtgcctatttcgagcgattcgatttaaaaaatcgacaacaagttaagacggttactattgacatgtatgaaccctatgtccgattatttcgcgacctatttcctaatgcagctattatttttgacagattccatatcgttcaacatttaaatagagaacttaataagtatcgtgtacaagttatgaatgaataccgtaataaaaaaggacctaattatacaatttttaagaataactggaaagttctattgatggatactagtaaaaccatatttagtaaatacagatggaataaatcttttaaggcttataaacgctcatctgacattgtagaattcatgctttcaaaagacgatatactacgacactcctacgaacttgtccaaggattacgaaaagacctaaggttatgtaattggcctaaatttattaatcgtttaaattcagttagtaaaaagtctgtgagtaagggtgtatggaaagtggttaaatattatagaaaacatcaaaggatgttaagaaatacaatttattacccagcatttaataatggtgctatagaaggaattaataataagataaaattaatcaagcgaatttcttttggttacagaaatttcaataactttaaagcacgtataatgatgattttcagcttgtacaaaggagaaaaaaagaagacaaccaagcccaataatggactggccgcctaataataaaaactctaaaagttgtattttaaaaatagttctttaaattatatacccaccacatttggtggagaaccaataaagaagccagtaaatgaatttataataaactcatttactggctaatttgttagaaattatgtcccagcctctctatttttttatgttcacattttttaaaagagaaaatactattaacataccaaacatcataattccagttactataattataaatgctcgataatcttactcaacttttccatatagaaaataacttattttaaattaattaattaatcacattaaaaaattatataatccttgccaaaaaagaacatacgttctacaatgatgatgaggtggtaaacatgattccaaatcctaatgcgccagatgaatataaatatgaaactgattatagaaaaataccaagaaaatatttaaaccctaaaatccctcaagggcgtggaaaaatcaaatggcaagcttttgcgactctcccgcaacagtttgaaattttagaacaaattataaaggatcaaaataaaatagaaaaaccattgctaacacatgattcattagataatttagatcagatttttcaaataaaaattcaaaatgatgagttatgtacaatctcatattgggaagacggcagcatttcaaactatacaggaaaaattttgaaaattgatacaatcaatggttattttacattttacgattctacaaatactaaacatacttttttcaatactaatgtgtataatatctcttaaacttgaattatttctctttacctgtgtattaaatatcttcatatattttattatataatgtgtttatttcatctttgagcctctttttctcattttctaaagattttactctcctttttaatgaagaaattaatgcgtctttaccgtcactgttatttttatgtacaaatatgtctttactttgttcacgtaactcttcgattctctttcgaattttactattattatataaagtagctttagatacatttgaatgcttagcaacaatattaaagttaatttcttcattttttcgaaccaattcatttattgctttagaaactttttgctcggttttaacttttcgttctgcatgtaattgttttaattgttcttgtctattaaattttcccatcttaacctctatacttttattctattacttctcccgaatataatgtttccatcttttatattacctaatatttcttcatatttatttaatatattagtatgtttttcaactatatcttgtctattattatttttagctaattctatggatttgaccgttgatttgatatgtaattcatatttttcaacatctaaatcagaaaatccaatagctagatccttacatggtttcccagaattacaagttaagcatggcggagcttccatatatggacaatcaccgctcaatctagcatgacaagtaccataaggattgtccattgcgtttaatttatgttcttgccataaagaattcaatgctttttctgataattcactactatgctgtatatttttaattttaccgtcaacatcaaaactaaaagccccttgatcaataactgattcaaaagcctttctttttgtatcatcaagtaacttagcatatctgagtgtcatttctggtgaggaatgtgctaataattcttgtatggttaatatatctgctccaccatttaacaatttcactgcataagtatgtctaaactgatgagttttgaaatggaagacttcaccttgttcatcaagaatattttttgtttttgctaaatgatttaagtgtgctctgaccatatgctgtgtaaagggcattccttttctttttcctttatgaatagcaaaaatataattattagggttgttatcttttgtacttttaattttagaattggctattaaaactgctactatatcagctaattcattatcgattggtatcctatgtcctttaacaaaagttttagcaatatcagtaattattgaaaactttccattaacttttgcaagacaattattttttaatgttaatacatcagaaattcttagtcctgttttaaaagctatccaaactacaggtattaaatctttgtgcaaatcatttatatgctcaaaaagctgttccaatacaaaatctgggatataatcaatttggctactatttttcttttcgcgcttaggaaagtcttgaggataaattaaaaaacgtatatcttcagagggggctatatcataattttgactagcaatatcatttaagaaccttctaattgcttttaattcttctctaacgaagttcctagaactttgcacatttttactattagcatattcaaataaaaattctatatatgcttcgatatgacatctatctagttcatttaaactattccttgtttctttatttttagatatattttgaaaaaacctagtcaaaactcttatataaaatcttgctgtagcaaatgctatatcaccagttatcaaacgattttttaaatatttttttgctaattctcgcattttaattgactcaattttttcaaagttcaaataattaccagttagtgttttattataactcaatccatatttttctaaatttctaatatcccatttatctttttcccattcttctcgcttatcaataaatttatttagattaatatacatattctttaaaaaagaagctagtccacttttatgttcataatcaccaaaaactattgttgatgattttctttttataggtatattatttttagtcaaccaactaaaccagtacttttctaacatattaatatcacaatctagtaaagaatttaaatttggataaacttcattaaagaactcagcaatcttgttaagtttcactgctccagtattaaatacattagataaagaccaatcctctttaactataagtttcaaaaaaaggtatttaaattctaaattcaaattttcacttttaatcctaaagaaaatattttttcttttgtctttatagttcttgatactatcttgaaattgctcgaacttgttaaaagctgaaatgtgccattcatcattttttaaaaagtaatcatcatatatttcagttattagcacttctccttttatgtttatagttctactttgtaatgtacataattcattaatcatagtactgtttgtaggcaaattaattggtattgacatagttattcccctttattaaaaacttgaaattgatgcttaactttattccaatcttcacgtatatcttcttcagtgggatgaacatataaattaatagtcgtttgtatattactatgaccgagtctttcttgaacttgtttaatatccttagtttcattataaaaaacagttgcatgtgtatggcgaaataaatgggggtgaacatttatagatgttttatgttttagccttttaaataatgaatatatatcactataatgcatagcttctcctacatttctaccctttatttttacaaaaagataatcagaacatatggaaagttcgtcaattatttcgtacacataatcgtcatataaatcaattaacgattgagaaataaatatttttctttcaccagtttttaaataagtaccattgctattaaatctatttttcaaaactatttggtgaccttttctaaaatcaaatttgatatcatcaatgcgtaatgataatacctcacctatacgtaatcctgtttcatataataattgtattaagaatttatctctaatattattagctgctcctaataatttcttaacctcaacattggttaacacttctagttttttctttggttcttttactttcaaaatatttttcaacattccatagtccttgtttacgtgatgcatgaaacttttatattttttagagtatttactttccgtatgtataaaatcatagaaattaacatctaattttttgctcctatagagataatcataaaaattagatactacagtaatagtcagattaattgtcttaggactaatgctttttccttttcggtgataagagaggacattctcatattcaaaaggtgttttcatccatcttataaaatcaacaaagttatcaaaactaacttctttatagcatatctttttactttctaagtaaacaaaaaatttttttagtgcataggcataggttttcttggtatttaaacttttattaacactatccagatacttcaaatatcttactgcatctactataggttcattattaccatctaaaatcataaaattgataccattcttagattttacttctactattttcataataatctcatttctaattttaatagtataagtatacactattcgaactctttttacatcatacatattaaacttattacacgtaataaaaaaagactatttaatatttttactttgttcattttttcttaaaatatgattcattttaaacaaaatagtctatatccttcaatatatatataaccttttgcaacattacccgaacaattcgaaacgattcaacaatacattatcgaccaaaacaaaattacacgtcctgtattatcagatgatcaattggctgagctaaacattcggctacacgaggcgctacaatatgcccaacctgtagaagttaaattttataataatggctttgtagattcagtacgcttaaccatttatcgtattgatgctattaattatgaaattgatggttatgtttacaatcagcaacaacgtcaaaaaatttctatctttgatatcttagatattgtcttgttaccttaatgctttgaacataattaaaggcaagaacagtctatattgtccttgcctaaatgttattagttatttttactttcgatatcagaaataatttctttagtttttctttcaatatcttcaaaatcttttttaaagatataagcaaatgctactacaccaacaccagcaactaatgttgtaatagcaactaagctaaatacgaatttaaacacacatttaataaaattccacatctcaatttcacctctgttaaattaaatacctatctacatttcattatactatcatatatagaataatcattaaataaatacccacttttacgaaatatattcatcaaattatatagtgagcaagctaatgattattttcaaaaatgccgaggaacctctgtttcaacgtgacatgaccttatatgctaatgttaacaatgactattatcgtgaatgctaacttaagattgttatttatgataagatgattttaagtttttaacttaatatccccaccatctataaaaatatgttttaactgattgataagtcttatacaccgagaaatcacctcaaacaattttatatttcatttagtaaaatataactttatttaacatgacattcaatatacatacgattactatttatttacaatatattacaactaaaaagaaaggggccgatgatatgcaacaagtgatatcagatattatgacttttagaggttcacatttcgagttaggtgttaaaactggtaaatggcttcaacaaacacctcttctaaaaaatcgagaaaaagaatggaaaaaacgtgtcccacgtttcgatatagatgtaaatgaaacttatcaaatattccaaacttacgcacctcaaatatgggaagaattaatgggactacaaagtatactcaaaatgccaacacgccaaattattttaaactttggacattatcgttttaccgatttaaaagaaagtggttgcacggtctttcaaggcaaagacttcatggttagaaattatgattaccaccctgcaacttatgatggtcgctacttactatatcaacctacagatagcggtttagctcaaattggtcctgtatcaagggtaactggaagaatggatggtatgaatgagtcaggattaactatgggctataactttatgcaccggaaaaaaccagcaaatggttttgtatgttatatgattggtcgtctaattcttgaaaattgccgaaatgtaacagaagcaatacaattattgaaagaaataccacacagaagctcatttagctacatactgatggacaaatcattgaaccatgcaattgttgaagtgacaccgagatcaatagatgttcgttatgataatatatgtacaaatcattttgaaatattaacacatgaaaatcgtaattatacaaaagaatctaaagaaagactggcgcgtaccatttcacaaactaatgataatttagatatgactacagcatttaagttattcaataatcctcagtatgaaatttacagtaaactattcaaaagctggtctggcaccatccatacatcaatgtatcaacctgaaacattaactgcatattttacattgggagaaaatgcgccaccagaaataatagatttcaaatcatggttagatggtcaagaccttaatatcactcactttactggcaatatagataccgacttaacttttgccaacaaataaataacaccgatattagagaaattatgcttcctaatatcggtgcttacatcctttatttattcaactttgatattaccatcaatcgtataaaattctaaaacattgtcgcttttcccaactttaccattagtaaatgttttatttttaactacgctatcacccgttcccggatttagctttagtatagtgtcttcaggtttactatcatacttaaaacgaatatctccttgtttagtagaagcttttgcatctacttttgatggcatgtttttaaattcaatgtcaccatgatcgtttaaaaatatggattgtttaatttgactcttgtcgatttgtagcgtaccaataacaactttaatattgctatttttaatgttacttttactaatataagtagaactattatttgtctttgaatctagtgcgtcaagatttgagtttttaataactacttcaccgttaatgctttgaatacttgtgttctctaaatcaacatcactgattctaacacttcctgctccagatgatagatttaaacgtttaatcattttatcaggcatttcaatcgttaacgttttcttattctcatgaaaaggattcatatcaattgcatatcctcttgtcttagaccttttatcactaatcttcaacgtcttatctactatattaattaatatatcattgtcaccatcatatttaactctaaattgattcccccgttttatacgaagttctgtactatccaaatttatagatacattgtcaaaagcatcgtctttgaatgttttatcatattgtttagtaccatatttgtttttatcatagctgaaccaaataatggttgctgctgtaaaaaagacaacaaacactaaaagcccaataaaaaagaatttcttcattttctaacgcttcctttgacagttttaatataccaaagtaaatattttaagattaaacgataaatgtattctaaaatcttaaatatgacaatgataaatactaatcctaatcctgaatatgatatggcaaaaaatacattactaattgagtccacaattcctctggatattgctgatgctaataaaataattggacaaaacagcagcaaaagtgatattaaaaataatgctaatacaaataatccaactatagatactggtataaggatgacaaaaatagatagaatgcctaaacttaatgaagcagcaacagctcttgaaatattttcaaatgttggtttagattcagcataatcaataacacttctagcttttgtttcagctgcaacatcttgtgggtcttttaacttctttaaaatttccccttcatcaacgccattaagttcttgctcataaaaataacgttcatattcatacattttttgatctcttaaatgcctaggtagcgcatcaagtgctgtttctaattcatttaaataagtaatcttgttcatataggtcactcatcccaataaaattatttattcgttttttataactttaagacctaaagctatttactaaaaaattcaatacgtttaatttctaaatcttgataaagtaagtttaattttaaatggttatctctatcaatatactttaccgatgagaaatcattgccaacttttgttcttttatatccgaatccaagattttcaatcgcgttatttatcggcgaaccaattcccccatcaaaattagtatgtatcttttcatctcttactaatattatccccttaacgatgttatccttttctctcactttaacggtaagatcagggtgagctttactgttataaaatttaaaacgatcaaacttaatttttttatttacttcatagccttttttatcaaacttctcatttaatttaatatcgtttatttcaagattagacaaatccacagttttcgtatgacgatattgatataaaccaattaatacaccaaaagaacagattaaaaataatataaacacaacccagcgattttgaatacgcactgatgtcaccctttctttgtacttatttaaatatagcataaggtgcttcccgtttcatccttaacaaaaattaacaaagaatttgcaattaatttatttcattaccttttattactataaattggtataatgttgtaaatgctaaaggaggtttttacaatgacaaatttagaaacttatttcaaaaatagccaacccttaaatgaatacattgatggaatgaagacaaatcaagataccgttctcagtatctatcaatcatttgagttaccagaagatgattcacgcatcaaaaaaataaaagagatgaattattctaaagtattagtaattactgaagactggtgtggagatgcaatgatgaatctcccaattctaaaacacatcagtgaagcattaaatttagaagtacgcgtgttccatagagatgatgatacaaaactgatcgatcaatatttaacaaatggtaaatcacgtgcaattcctatcttcgtattcttgaatgatcaattcgaacaagaaacagtttggggaccaagagcaaatgaagtccaaaaatttgtaactgatgttcgtgctgataaattaccgagcaaagatcatccagactatgcagatttagaaaaagaaacacacttagttatatcaaaccgctataaaactgacgcttcattttggaaagcagtttataattccatcctaaataaattagaaaataaataaatttacaataagacaaactttgaggttgggaaaatttaaaattcccaacctcaaaattatttttattaaatgtcttttttagcgacatataagatattcaaaatgaagaatatcactatagaacctaatgaaattacccattgccaattgctaaaatcaaagttagagctaatcattttatcagttaagtaagcaaaagggatataatcaaaagcatctaaaactttttcaccgtatcttgggataaatgtaataaaaggtttaataaacggtacaatgagtactaaaaatacacctaatgaaaatatcattgctgttttttgtgatgcaagtgtgattaagaataaaaacaagccaaagaatagtaaaaagattaggaagaaccataaattatctacatatttagaaaacgccaaattttttccattactagatgcctgcacaacaatcaaaatcacataatgaattaatgcaaataatattgaaattaaaataattgaaattgttttcgaaataatgtatccaacgcgtgttttaactttactcatatatagttgaattgtaccttgtgaaaaatcacgcgtaattgtcttaacaacaaacattaaaccaattattaacaataaccattttgctgcagcaaatacagatccatagacaataatatgtttcgggttatccatcgaatttgccataagtatactttgagttgcaatcaaactagatacgactagtatcgctaaatatgttaaaggacttttaaaaatactataaaaatcatacttaactaaatttaaaattctcattatttatcacctctttgatttatattgaagtacgtatcacgcaatgaacttttacgtgtttcaatatatttcggataaatatctaattcagataatgcttttagtataacttgataatttttttgtgcattgatcattaaatgtccgtctgctttgtcgacattttgtaattggaaatgctctgcaagatatttttcagttctatcaaagtctttatgatcaacagtaactatcgttgtgtcagatgcaacaccttcctccatgtttacatcttgaacaaaatgtccgtctcttaaaaatacagctctatcacaaattaattcaatatcttctaacttatgacttgatattagaattctcatatcaagttcatttactaaagacttaattgtagtcagcacatcaattgagccatctggatccataccatttgtaggctcatccaagattaaaaatttaggtttattcattaaagatactgcaattgctaacttttgcttcatccccattgaatatttcttaactttctttttaatataaggtctcataccaaatgcatctataattttgtctgtgtatgctttatcaaaacccttacctaatacttgtgcaaataatttcaagttatacaatcctgatttattatcatataatttaggatgctcaattaaaaaaccgatattatctgcattatcaatatctacttttccatcaaatttaataatattaccattcattactttcataacggttgttttaccaacaccgttttttcctattaatccgacaattctactatcgccaaagtcaaaatcaatatcatttaaaacgacatttgagccgtatttttttgtaatatgttctaatttcatcgactgcctcctttaaattttctagtatttattttattgagctgtttaaaataattaacaataagtataacaatgcttataattagaaaaccaatatttaaaatatatgaatataaatctgggaatgatgattgacttagaacaaaataattcaccaacactattgcaattgaaaataaaaatggaactaaaatgataatagtaaaaacgtatataccatatggcactttgactctacgcaattctgtaaattgactaaatgcaattggtatagacaagaagttagatatgacaaatgcatatgcagttgaaaaatagattgaatttggttcaatcacatctgcttcataagcatataaactaataacaagcgttccaattaatgttaaaacaatgcatgtaacatagttggcattaagcaattgtttttttgacactggtaaactcatataaaaataatatgaatcattaccacctaatctacgattgagtctaaataagtgaccagcatctaaaatccaaataatcaatattgttggacttataaaagattgcaataggtaaaagaactttgttgagtcaagcattatataaaaaggatataaggttaataatagaacatagatgataagtgtatatcgtcgtaatttaaaattcctaattaacaatgccttcatttaaaaaccttcttccatcaatttgatgttttcatgatatttaggttttctcttttcaagataaaccattaagttctcaatagaaggtgtaatgatattcactttatgacctaaaatttctttaaatacttgcgcatgttctgttaatcctataaatcccgtacgcttatgttcttcataaataagtagagatgctaattcatcatcaaggtcctcaatagcaccactcacaacttgatatctttgtaacagttgttcttttgaaccatttaagataacttcaccgtcacttaagtgaatgatataatcagctattttttctaaatctgagataatgtgtgtcgacatgaatattgttttattttcatcaattaattcttgctgaattatctccaatagctcatttctagctaagggatcaagacctgaagtaggctcatcaaaaatatacaattcagcatgatgtgaaaatgcaactgctagtgataatttcattttcatcccagtcgaaaatgtttttattgatttattgattggtaaatcgaacttttcaagataaaattcaaatacttgatggtcccatttacgataaaaaggggcaatcattttttcaagttgcttcgtagtccatctctcattaaaataattttcagagtaaacaaacccaattctattctttaactctatcggattgagagccatatcctcttctaatactctaataacaccagtttgtggttgatacaaatccataattaaccttattattgtggttttaccagcgccatttctaccaataaaaccagtgacgaatccttgaggaactttgaaagagatattctttaaattaaactgatcacttgaataattaacattacttaattctatggcattcatgatgattcctcctcataaatgaacgttaaaatatcttgaagttcctcaagtgacatttcgatggcttgcgcttcattaaccaattctttaaccaaattttcaatggtaaaaaattgtttctcttttaaaatagaactatcttgctccttaacaaaggtcccttttcctctaattgttgtaacaaaaccgtctttctctaaatcttcataagcacgtttggtagtaatcaaacttacttgaagatctttggcaagttctctcattgacggcaaatgctctccaggagcaacatgtccctttaaaatattttgttttacttgttgcttaatctgttcataaatcggaaaatcactattgttttttaaaattattttcatcaacgtccccctatcactttctgtatatatacaatatacacaatatacacagttttgtaaatatgcatgtctcattatcaaccagtcttcagaaataacactgagtattgtattactagcagttgaataaaatgaaatgacactaccatttaatcttgcattgtctacttcaataaaaaagactgctaaaacgaatgtctttaatctctacgtgacaaccgtagcgtcaacataaacaatcgttttaaacagtcaattctatttactatttttacgtcgatcattacttctacttataaaagcacaaatcataaacataatcgctgctaataataattttataccttggctttcatgattagttgcttgtaaataataaccaataataaataaaataattgcaagtactacaaatatttttgttagatgtttcaatttatttcacctcaacatcgacattataacaaatataaatttttttaataagttattgaatttcaaaagttcaaggtactaatcactttcaactaaaatagcgcaacaaaaccattcaatcaaaatgattattgattgcgatatattgtgttcaatgatattatttaagtgtatccacagaattatactacacaaccccaagtctggtaccagcagacttggggttatttatgtgtgtaggatcattttttatttttccatttcagttctaaccaaagtcgaaaaataattagtaagccacctgtaataagtgtcatcatcccttcttgccaccacatcattacactacacctccgttcgactaaagtatcatactgaaggatgacctacacctattctaacataaaaacagaacatatgttcgtattttggcagcagattttacatattattcgttaattcaccaacaacactttatctttggtataattgaagataatatataggcatacaatttttttaaagagaggttaagcaataatgaatcctttagcccaaagcttaaatgaacaacttcaacagtcaaatgcaactgcctttgcaatgttatctgacttaggtcaaaatatgttttatccaaaaggcattttatctcaatctgctgaagcaaagagtacaacatataatgcaactataggtatggcgacaaacaaagacggaaaaatgtttgcatcatctttagatgcaatgtttaatgatttaactccagatgaaatattcccttatgcgccaccacaaggcatcgaagaattacgtgatttatggcaacaaaaaatgttgcgtgacaatccagagctatcaatcgacaacatgtcactaccaattgttacgaatgcattaacacatggtttatctttagttggcgatttatttgtaaatcaaggtgacactatcttgttaccagatcataattggggtaattacaaacttgttttcaatacgagaaatggtgcaaaccttcaaacatatcctatctttgataaagacgggcattatactactgattcacttgtagaagctttacaatcatacaataaagataaagtcattatgattttaaattatcctaataatccgacaggttacacacctacgcataaagaagtgactaccatcgtcgatgcaattaaagcattagctgataaaggtacaaaagttatagctgttgtggatgacgcatactatggtttattctatgaagatgtgtatactcaatcattatttactgcattatctaatttaaattcaaatgcaatattacctgttcgtttagatggtgcaacaaaagaatttttcgcatggggattccgtgttgggtttatgacatttggaacgtctgatcaaacaactaaagaagtattagaagccaaagtaaaaggtcttatacgaagtaacatttctagtggacctcttccaacacaaagcgctgttaagcatgtattaaaaaataataaacaattcgataaagaaatcgaacaaaatattcaaacattaaaagaacgctatgaagtcactaaggaagttgtctatgctgatcaatatcattcacattggcaagcctatgactttaactctggatactttatggcaataaaagttcatgatgttgaccctgaagaacttcgtaaacatttaattgaaaaatattcaattggtgttattgcacttaatgcaacagatattcgtattgcgtttagctgtgtagaaaaagaagatatcccacatgtatttgattcaattgctaaagcgattgatgacttaagataattaatttcaaccaataatctgatgagtatgactcggattattggttttttatttttaaaattattccttctttcaaagtatcataagatatattttattcagcaacttgtcaaacactatacctaattagttttatacatctctcctaacaaaatcaaaaaatcggacagatgaaaagtaaaaaactttttctatcagtccgatttattatagaaccaatttatataacttttggcaaatcacttcaaacattcaagcatcacatctctacaaatgtaaaaggcaccccacgattgtgagatgccttattataaaattaaagattagaatttaagttcaatatctacctttttaatgtcagttgctttaaatactctttcatctttatactcagtttttaagtctacatattttgacgaaccattcttaaaatacactttatacactgcgcgttcagcaagttctatgtcatgtttagttatcccttgatcatttgcaattgctgatttaagttttatacttaaatcattaattgtaattttgcttgcattatagaacacaaattcatttgaaactatgttttcaaatttatttattgttactgggaatttcacattattagatttatttatttttttttgatttagtgtattgttttacatcaatatctatctttttaatatctttggcactaaataaattaggtgtaaagatgtctgattttaaattcactacttgtttctttccatttttgaaatatactgtatattttgcttgtttcgcaaattttaagtcaagatcactgatgcctctttcactttttaatacagatttcactttgtcatttaaatatttgtaactaattaattgtttattcgaaatttttagttttgataaaattggtgttgatgtgccatttactgcaattgtatatggtacatagctatccgctttcgcttttgaccctgttttaacatcaatatctatctttttaatatctttggcactaaataaattaggtgtaaagatgtctgattttaaattcactacttgtttctttccatttttgaaatatactgtatattttgcttgtttcgcaaattttaagtcaagatcactgatacctctttcactttttaatacagatttcactttgtcgtttaaatatttgtaactaattaattgtttattcgaaatttttagttttgataaaattggtgttgatgtgccatttactgcaattgtgtatggtacatatctgtctgctttcgctttagttcctgttttaacagtaatttcaattctcttaacatctttcgcatgaactaagtttgctgtgtaattttttgaatttaactgtaagattcttttaccaccatttttaaaataaacagtataataagctttcttagcatattttaaatcttgttcactaatacctctatcatgcttcagtactgattttatttgactagttaaatttttgtaatttgtccaaggtttatttgaaaatgaaagattcgataaaatgtttgtagatgtaccatttagattaattgaatatggaacttgatagtttcttttagctttattttcgatatgtttttttgtatctacgttaatattgatacttttaatatcacttgaattgattaaattcgctgtgtaaatacctgatttcaaatctataactttcttcgttccatttttaaaattaactgtatatttcgcttgcttcgaaagtcttaaatcaacatcagtaatacctctatttgattctaaaactgatttaactttaccctctaaatctttgtaactaatattttgatttttattaaatgttaggtttgataaaatgttttggcttgtgccgttcactgtgattgtatatggcacttgaacatttgctttagctttatctttaggttgctttttagtatctacgttaacactgatagctttaatgtcacttgtattgattaagtcagctgtgtagatacctgatttcaaatcgataactctttttgttccatttttaaaatgaaccgtatattccgcttgctttgaaagtcttaaatcgatatcactaatacctctattaaagtataaaactgatttaactttattctctatatctttataactaatattttgattcttattaaatgttaagcttgataaaatgttttggcttgtaccgttcacagtaattgtatatggaatctggatgttagaatgtccatggtgtaatgtacttgatgatttatctaatggcttagctgcggcagatgcttcgttagtattaaagtttgctcctgttgatgctataacgcctaatgctaatgttgttgtaatcaatgacttaaatttcataaattatctctccttttttatgtaattcgtgattgcaactttattatagccagactttctctattttttgaattaactgaatattaataataaattatctttaacaataattttttaacactgttaaaagttcttttaattttgattaactaactaatttacaatacctaaaatgttgtttgattttgtttataccaagtttcaaacttaaatgtcataacaatcttcatttcttaattccgattacatttgtcaattatatttacagcatctttatactcaaaaaacatttacttaaaaatataaattcgatttaataattaatttaaatttagttaatcaattttgcatctattttgttgtaagctatataaaaggagtgataatgatggtgaaaaaaacaaaatccaattcactaaaaaaagttgcaacacttgcattagcaaatttattattagttggtgcacttactgacaatagtgccaaagccgaatctaagaaagatgatactgatttgaagttagttagtcataacgtttatatgttatcgaccgttttgtatccaaactggagacttttaacataaaattacttatcattcaaaaagtaaaacagcataatatcaaggtttataactttatcattatcaataatacctcatataaaataaaattttagggactttttagggactttaaatttaaaattacaagtttaatagaaacatcaaaataatcacatgtttgtgtggaatgtacaccccaaaagctagactgaaaaatctattttttgaggtgtatttttataggtaaatataataaattagagtagacaactcagaattccaattttataataatattgcttgacatatcaaactagatagtactattttgaatatattattataatcaaaaattcattgtaaacttttagacaaaaggaagtaataaaaacgtgaaatttaaaacaactaaagaatgtaaaagtaataatatctttaaaagaagtcaagaaattaataatagagaaagtgaaaagggttgtttatggggcattagcatgttgattctacttttcttattgattctgtttggaataactgcttgttcatcaagcattcactttattaattagatttttttacttggaggtatcatgtgaagaaccatacaaatataattaatatcttattagttatagtcaactcattaactcattttctaactctaaacacctcattttttaataattcagcatcggatttctgttttatcataggggctatatttttcttaatcggaatttttgttgcaatatacggtatgaagcgagcaacatattggttaaacttattgattttatttaccaatattttttattttctacacttctgtgtgttacttttgttaaaatatataggatttaaattatttatttatgaagggtgtgtattgttatttatctaatttatagtctaattgtctatttcatctgcattataaattttttcataatggctgcaccattcttaatgactaatgctgattatgtatggacgcctatgactacagttacgttatttattttgagtttgattattttcttgatatttataaaaacaaaagatgtcgttcatttaacaattttcatattaaacttacttttttcaatactttattgtttgcctatactgttttatttatgaacacttttatattatctagaaaattaaaaccacccgtaaaagggtggtttttttaatatttactttttagtgcttcgtcaatttcgttataaatcttttgaagttgatattttgcttctgacattttcttaaagtcttttgacttaagagcatacattgctttttgacctgaaatttttatagttcgcttataataagtgtttaaacttccagtagctaattcattaacatttagttcatctaataacgattttaattcattagctaacttttcgttttgatattcattcgatgttggcaagcttgtgcctcatttttatctagattagttactagtggtgatgctaaaacgattgctaaagttcccgcaagtatagattttctaattttcattttttattctccttagtaattagtactaatttattttaatgactaactaaaaaaagtacattaattattcattaactatatagatcttcttattaaatgaaaattaataaattatcaaattgacataccttattgtatttatagaaaaacaaaaaaaggtaagcaccgaaatgcttacctacttcccataaacaatataacacatatacattgatttggaaagcgcaaaaataaatttaatatactagcccgaaggggagcaatacataaaaaatgaaaggcgctccttgaaaacgcccaaggtaatattaacataaaatggctactattgcattatctaattttatttaattaaaacaaatatatatagcacaaaaaaactagcccgaaggctagcttatgaatagatgaaaatttgaacacattgctgtgtctaagataaatatagcacatattaattactattaatagaaaaattatagcgttttttagattatttcaatttatcgagaccaaattcatcaaaacactaattgaattttaatttttagttaaaaataattaatcttttattaatttcaagttaattaatatatttcgtcgattagattaaactcattttaggaatttcgcaaaactaactataaatttaaatatagaatttaaggagaattaacatcattatgaaaaagaaattagcaacaacagttttagcattaagttttttaacggcaggaatcagtacacaccatcattcagcgaaagcttttacttttgaaccgtttcctacaaatgaagaaatagaatcaaataagaaaatgttagagaaagaaaaagcttataaagaatcatttaaaaatagtggtcttcctacaacgctaggaaaattagatgaacgtttgagaaattatttaaagaaaggcacaaaaaattctgctcaatttgaaaaaatggttattttaactgaaaataaaggttactatacagtatatctgaatacaccacttgctgaagatagaaaaaatgttgagttactaggtaaaatgtataaaacatacttctttaaaaaaggagagtctaaatcatcttatgtaattaatggtcctggaaaaactaatgaatatgcatactaatagtagttacataaattaaaaggtagatatttcttttttatataaaggtttggcagacatttcataacttgccaaacctttatatatctaattatcaaactgcactaaacttaccaaaactgcttattctattacctgccttgtctacctctcctgtcgctatataacgacgttgtccactattagcaatataagtaatccatctatagccattaatgcaatatgcgccgtcatatttgatagttgcgttattgggtaatacacctgtaattcttgaattagttgaatagccatccctcacgttattacctttaacattggcaactgtgtaataaccagtctcttttttatacggtacattgtttttatcgagtgtataacctgctggcactggtgaattcttttcatttttagctggtgttttaacattactgatacctgatacacacttccaataaaaataaccacaccatttaagatgcggtgtagcgactgtaatatttctatgttgttgagatatatgtatcgagtgaagggcaaaaaggatatcaattgcaggataagtgttaggttactaggccacttaacaggctatatagttcactcctactatatacagttaattataacataaaaagcaccccgtaaactattatacgggaatgctaaagtcatatatactacgagggagtagtatgaaaactatgctctctatcataagaaaaaacacccagtgacatgcttgggtgaacaaggatagatgtaaatagttgatgcatgtgtaacacatcataacaaaaaactagcccgaaagctagctataacatacaatctaaaaagacgtcccttgaatacgtctagaaagattataacataaaaaaataggcaagtaccgaagtacctgcctaaaaaaggattatccactttttcatcctaactgatttctccccataagtcacctaatatctgattaggtggggaagaaccattcgtgcatgaatgagaatttgatgaaagataattttcactacacatattcaatcaagacattgctttctataataaacaactattttgttttatttcttttctataataacctttgtaattaagttgaatccagggtttttaatatgctctgataaatctgggacaacaaaacctttttctgttatagggaaagacttcgtttcttcttttttcttattcttatcataataagtgacttcgatctttgcgcttggatctaattcaactactctaaactctttatatgctgtcacatctaatgcccattcgacatagtattcaattttttcttttgtaagtgtagtcccaggtttaataggaaactcgacataatgaggggatagcaattcatttcctttaccatcaactccagtcacatttaccatcaaatacgggcctgttggttcaaaataactcgcgtcatcgccttttttatattttcctttgtcgaatgaacttgatgcacttacctcattagtaattgaagaaaatgagaataataacaataaaacagttaaaaataataaacctcttttgagcatggcgcttcctccaaatataatatatttgtttttatttatctctttttatagctaacacccttatttaagatgataaatatcaacaacttcattttatattgagaaaatattaaaaatcaataaaatattaaaagaaactaaaattacattaaaaaataattaacaaacatttaacattttaacctaagaattaaaacacttctttcacaatcaatctctcatgccatatccactcattatgattgttccaataaatgcgacaccaaccatctataatttcaaacacatatattaatgttccaggcgcgtatacagcctgtccaacatcgaatctatagttagtacgattatcaccgtatctagtggctgaagtagcacctaagccgtcgattttcgcattaaaataagcaccttttgaccatttaaggttataaggcgctttacttccaactgttattttacttgcagatttaccgactgctttttgagcaggtggtttaactttatttgtgatcttattcattaagccctcacttttatacttaggtctaataaagtgagtacagccgtaataattatcccaacgtaactttgcaggcgtatttgcgttaccgtcatagttctgttccaaaattaaaaattggtttgtattaccaccattaaacactaaaccaatatgaccgtattgtttatatattcctttggtaaatacagccacatcacctatttgtggaacaaacgatggtgtgttttcatatactgttgccatgtttttaaaatcgttattgattgcatcttttgcatttccccacattctaatttctaacaaccaataaatgtaatcaactgctaaatctgcacattggtaaccataccaaccgtcaaaatcaatatatctaccttgataccaacgtaaccttgctcttgcttcactgtatgttttcattattttacctcctagtattttcttcttggttcttcatattctaaagcttggtggctatcacctatacctttagtagtcgggtcttgaatcacaccagttaatactaaaaatcctaatatagcgtttaaaccgtctgttaattgctctgtataaacttggatatcatacccaatagcttttgcgatgttttgagcaaataaaaagatagctgacaatatcgctacccaaaatgatttttgtttcattctaattttccaattaatcatattcttatctccttttacccaaaataaaaagacgactaataagccgtctatttgatatttatattatggtgtgttaatttatatatagaaaaagggcaacatgcgcaaacatgttaccctaatgagcccgttaaaaagacggtggctattttagattaaagattaaattaataaccatttaaccatcgaaaccagccaaagttagcgatggttattttttattgcttaattcaataagcttgattactagacctatcaatgcaataaggaataaaccaaactgcaacatggtactaattgtaatcattaggcgtctcctttctaaagatttcagtaatgccaccataggcaccacctccttatactcagatagccaccatctatccaacttgctcacttctgcatattaccataattacaacaataaataaaaagtcagtaccgaagcactgactaaaacttatttacatttaccgaaccaaaaacatgtccagaaactataaccaaagattagtttaaacattttattcacctctcttatatgcccataagcatacgcaataatgctataattagcgacccaaatattgtcccaactaaaccaagcacccacattttcatatcacgtatgttcttatcattttctttcttattcttttcatctatttctctttctttttgaatagcatctaaggttttatctaatttaatgttaacttgctcttgggttttttgacctaatttaatttcgttgagtgtgctgagcattgttttatcattctcttctaaccttctgatgcgccattcatgttcgtgttttttgaaccaccccaattcagtacacccgctttctaaaagaataaagattatgagtatctaactcatagcttttcatactgtttcagtgttaactgttacctctggagataaatctgatctttcaactacttctttaactactttcacacgttgttttttgttagttaattgatataacaaatttaacgtctccgcaattttcttagcgttttcttcagatttaaaatcttgagcatggttaaccatttcagaagttgtaaaacttcctgtgaaatcttgatatactacacgttctgtaccttctttgtcgatttgtactaaaataaacctttctgtattgttgataatttcttttgccataattaaatgacctccttaaatttttgtataaaaatagtgctaaagattactcttcctcagcacattgttgattttctttattttcttgtatatacgcttttaacatcgcgttttcttgtgttaacctcataatttcctgtgataaataatgaattgtatattcaggattagcttgtaatccttgtttgttatcctgcattctttgactcctccaatttcttgattcttagttgttgttctttgataacagggataagatgaatccatagacgatcatacgctataccttcaatttctcctttgtcatcatacgtgacaaactcttttaatcctaaattctccacctcttcagcaatcaaacctacgtatctatcaagtttataggtgtcttccgataattttctatcttctctcagctctctagctaaaatttcagactcagctttatcaaaccacgttctaataggtaagttaagaatagcttttgaatgttccagttgttcatctctatcgttatattgattttcgatagataacttgtatttacgcgctgatgtcgaacgcccaattgtgccagcagaagtaatatgcaaattagctgcggccgaataagtacgtctataaattgagttagaagctatcctatctcctgcatcatctgaacctacagacagtaggtctgtactctgtatatgaatatacctattaccatcacgtcgtttcagcatattaaatttgccataccctgcttcgattgttgtatctccacctgttgcatatcgtccattaacaatttgaacaagacctttatttctttctttagaaaacctgatacccgcaccgtaatcatagttctcatcagaaccaaacataatataaccgtcactcgaataagcattatctgcattagacagcgtgaatgcaaatcggtttaatccaggcactttgtctgtgtttggatataaatacaccggtgcctgtttgcttttgatattcgatgaagcgtaagactccagaacaacccgattattatctgacgttagtgcaacgacaccaccataggaattgattgttatgccattcataccgctatcactgtaagttttatcccaccattgaatagtaccggatgaacctccgtcttcgccttctccatcaatatatgttgaaataccaaaatgtgacatataaagtgaaccgcctgcggtattatttctaaaccttagatgtccatctttaagacgtgtgaatatatcatcggttgatcgtttgcctttccaagttcgttgcacaataccacctagttcaatagaatcattctgtatttgaacatatctgttattgttaccgcctttaattccaattctattaacattgatatcaagaccctctcttgataaattaaggctgttgacaatatcggttttatctactttatctcgcatattttggataagaaggtttatttctctattaccgttaatatcaattttatcagcatttaatctaataccacgtggccccacatttaaagcttgagccactccgttatcatcatatctgattgttgttccatctgtaacgttttggacaatctcgtttaatatatttgaaagtgtacgattggttgcattaaactcttctttagtagttcttaatttgatttccttaccattttgtataatttgagaaccatagcgagtcagtgttctcctctgtgcatctgtgctttctttgaccttgttgtctgtataagcattagctttcttttcagcgtttctagcctttagttctgcgttttgttttgcctcttcaagtttagcttgagcatcttgtatagcgcgttgctcttcttccgaaattttaccatcagcatacgcttgcgattccttctctttaagattatcttgagcatcaatgtatgattttaaagcttcttgcgcttcttgatttgcttgttcaatacttgctttaatctcaggattattggacaaatcacttaactggtcatcagtatattgtttttgttcttccaatccgtttcgatattcgtttaacgtaactttatctttgatttcaccttttaaagtcgttctctcagcttcagcagtatctaaacgttcaacaataccgtctttgtctgttttatagtccgatgtttttacatagtcacgtaattgttcttttgtggattctctagctgcttcaatagctgatttaacaacattaggttctccgactaactgcaaatcttcattcaccgttaaaccaaattttgttgctattatttccaacgcttctttatatttttcatcagtgtattgtgactgtaataatttaaatctatctgaaatggcgattttgacatcttctacatctgtataaacatcttgtaatttctttctatactcaagaaataaagtttttgtatctaccaaccgaccaatcgttgcagtttcgggtgtcatagattctaaattatttttaatttgattataaacatcaatcacagcgtctaaacttgcttgtaagtccgctttcaaatcattatctactaagtactcgctattcagtaattctgtagcttctgacaaaagactagcgtgttgtatagataaattaataaaaatattgtttaattcactgaatagcgctttctctcttgttataccacctaatttttcaacatcatttggtgttgcttcaatccatcgaccattccaatatctacgcaagacagcaacatcagggttacttgtatcataccaaagcgtatcattgactggattttctggcggtgtatcacttttatgaattttgcgttcaaagtattctaattcaccatctacaacatcttttactatagtattgatattgctaatattgtcgtttaatttttggtgtattaggtttaatcgcttgttaaactcttctcgtaattctgattctttgaactctttaggttgaccgaatgtatatgtgctattttctgaaattatgttatattcttcagcaataacttctgcctctacatacaatggcgggttaaaatctctatgttttactctgactgtatcgccaattgatataatctcgtgcggatacgtaacttccaaatcagtagaagtaatctcatatgacataactgccgacttacgtttatttaactctgttttggctaaagaacttaatcgtgtttcattcatattttgatcatctgattgtggttcatatatcccccaaatatagcgcataggtaggttgaattgactttgcgcttcgtcatctgtcacaactagctctaaacgcttccctttgtcattttcaggtcccacagcaattaatgctgttttgatttctgacatatcaatcttcctagttaacccgactaaatctttaccatattcaatttctttacctttgaataagctgtttttctttttgagtactacatatctacctttgacggtattagagctaagctcaatataaaaatctaaaaccattttataggttgtacataattgctttaaaacttcatatctagtttgataagaagtccatgacgtagtacgtaagccatcgtattcggtttgttcagaaacttcccaacctgtatcgctcaacacatctttcaatgcttctgaagttgtctttttctcaaattttcctggtgcatacggtttagctgttgttatatcagcaagataagacgctatacattctatctctgtgtagccgtccatcgtatcttgaacccagttaataataaattcacgccattgtttgtttgaatcccttataataacacgatgtcgttcacggaacttttcagctctttctgatgatatgagcagttcaagcatttctgaattgtcattaacattacgtttatgaatcgctctaactaaggaagggtcatcagtagaaaggaaatctataatcttgtcgttaaaatctaaaacatgtatcacactctcatctcctttctataaatatctatcttgccatttaaccgtcgtatcaaagacgttttcaggttgtatgattaattcactgtacccagaatcaacattgaaataattacttccaaacgatttctcgctcaacattggttcctcattgatgacaacactttttgcttgcatatctattttcactaaatcacctttttgtataatgacatcccttgcgcctttcggtttcggtagaatctccgtattgaatgaacctaatccattcatctccatccacttataaccgttatacttcgcactatagatagctatgatagaagctggacgctgataaaacttaccgccatctatccactctttctcatccatatcaataggtttacgtctatctgggtctttaatgtgatcaaatttccaagttttaatagaaaatttattacctactcttctgagccgcatataaacaacgattctgtccaagttatacattatcggtttattctgatagtcgtatatctttttggggtctcctttttggttatacaacgtaacaacaatatgtcctatttttctatcatgatatttattttcataaccaatagaagcaagtaacttaccatcactatcataaatatgttgtgctgttcttccggcacctttacctttttgttcaacaatacatttataggtaatttgaaaatctgtcatcgctttagggagccctcgtttcgtgccagcaccaacccaaccttttgcatcaggaaaattagttgctttatatccttcgccaagattggatatcacaaagtcaccgccgaccttaccacctaagtcattacttggaatatcttcagtaatcatcttagtccaacctttgaaatcacgaaactcactatgataaacaggaggcatgtaatccttaacttctttggttacctcatcatcaccaaccataaaataatcttcatcatttttagtaatcataaagtaactagatggtttaattgctcgggcttcaacaattaaaggagtgtcagcagtcccactatttacaactgaaacttggtctgaaatcgcagtatttttatttcctgttactgaatatttgtaagggtctgttagtactactttgatagtgaacttaacaggtattgtaaattctttgtgcagctttattggtccttcgaaataagcgttccagtaccaatctttagatttgaattgtaatttaacttgttcctcgtagttaaaaaactttactaattcattcaagacgtcatcatgtgttttaatgccgttgtgagataaatagtcattacgtaccaccaaaggtatatcaaaactataagattcaagcctacgccctttatatatagaccccgaacgtccatctacattttctgtttttaaaacataattaaaagagggtatttcaaaccctctttcgacatacaaccaaggaattgttttgttgttcactttaatagtgtctatcattgaatagcaattcctccttttctaaactttacttttgttgattcttgcctttctcgcttttctatagacgcgttcacctttttatcaaaagcgtattcgtcaataatcggctgataatctttatctgcaatcacatcgttagattgtgctattttcagtaataaagctatttgttgttgctgttgttcaatcattttcaataataagctaggatcatcaaacccgtttaagtctgataattggctaggacgcttatttttactcgcttttttccctcttacttctgctgctgcataatgcaaaatcttcattgcatcatttctacgagctggatctgttggaataatccattctggatgaccgtcttcacctaagttataccaaccatcaaaaacttttccacctgtagcatatgcgtaatcaccagcacgtttaaaaccaccccaaccatatcgtctaacaatgtactgcattgctgagataccttgatgtactggattattataattagtgtaccctcgtttagcgttagctctaaaagttgagccgataatttggaataatcctctagacgggtctcctctttgagcattaatatcccaattattcactgcatttgattgatagttgctttcacgctttgcaactcgcatcatctggtcatgaatccacttacctttataacgtcctcctaaaatactttgcgcttgtcggattactcggctggcataagttgcaccacttccagaagtagcatcaccgccaccaattgataacctaccttttttctttgcatttcttaaatatggttcagggttaaaatggcgtccgtttctcctcatttcaaaatgtaagtgtggtcctgtactaaatccggtattaccagttaaaccaacaacatcgccgggctttaccatcgtgccactaggtggtgatttgctaaagtttttcaaatgcgcaaatagcatatcgataacgccactagtaatttttacatagttaccataaccaccagacataaacggcattcttgtaagtctaccacccataggcgttctaacttcttgatatacaaatggaaaatcgacaccttcatgaaatggtcttccagttgcagcggtataagctgcggtacgtccataatgataattaattttgtcagggtctaatattccgccgactaaatcgccaccgcccatagcttctaaattttcttttatccaatcagtagcacttttcttaatcttagaccatgcagcttttgttatgtcgcctgcaattcccattcctttagttaaagaattgaaatcaattccaaaagcttcaagtatataatttaaaagttttcctggattttcaataaaatctaaaacatcgccaactttatcgccaagccatttggtacctttacctatttgatcttttgtccagttaaatgctgatgatgcaccggacttaatatctttccacatagtacctaaactaaatcttggaagagttccgtttaacattgaataagtttgtgcaccgttatatacttttgagcctttaggtaaataagcagtagtatctgtatttggtgtgattacacgtttaccattagggaattcaatcatttcgtttctaaaaccatttggaccatttccgcgtcccttatctccaactgtagcgaatgtgtcacgtgcaatcttaccgttcttaactaatcttgtagtagtatgtgtgtgctctgtaccagtatgtaacttaggtattttatccatgcccaacttaccaccgacccagtttaaaccgtcgattaatttattaagtccttttttaatagcatctaccataccgccgatatgacttttaattttgctgataatactttgtaagccgtcacgcatatttgtaaaaattccacgtaccttactccataaacggctagcaattcctaccgtattatctttaatggaattccaaatatttgacatccaatttcttaaattactaaaaatttctttcgtcgcattccataaattagtaaattttgatttgacgccactaaataatgactgcgcttttcctatcgtattcgtacggatactactccaagtattagataaccaatttttcatattcgtgaaaattgatttgacactattaaataagaatccaaaaatactttttgtcgcattccaaattgctgataaagatttactgaatatactttttattacgtcccaaatacctgctattaatccttttagcaatccgccaaagtacctaacaacgccaagtattttgcctacaaaccataattgaattaaattccatattaattgaacgactcctttaagaatcataacaatcgcatcccaaactcctcgccaatctccagtaaataaacttgagaagaacttaattaaacctagtatgatatttaaagctccttgtatcacaccttttatattctcccaagtactgacaattaaagctttaaccgccggccaaataaattgcatcacttgccaaatcgcgaacatgattggtttaattacaaaatttataataaattcaaatatagctttgataaaattgcatatattttgaagcgcttgaacaatagaaattccgttttcattaaagaatccattaatttgactccaaatatctttagcaaaatcaactattgctgatatcgcttgtttaaagatgtttttaacagaatcaatgaaaggttgaataaattgaataaaattactaaatgtttgtttaacactttcaattgcaccattaacaaaatttctgaaagtttcagatttcttataagcaattgtaaatgcgactgctaagccagccaaaacacctaatacaatgccaattggaccagttaaagccgtgaagacagttcctaatataggtactttagtcgataaaaaactaattaatccatcagcctttgcaataccagctaatagtggggctaatacagttactgcattgccaattgtacttataaatgcgcctaatccaaaaactacaggaccaattgcagcagcaataccaccgaaaataacaattgatcttttagaaccatcacttaaattggaaaaccaatcaaccgctatagatagctttttgattaattcttccattactggtgcaaacgcactttcaatagaagtccatacatcagcacctactaattttaatttattcattgctactttaaatctttcggagccactttcagaatctttaaacgtttgatttactgtgccttgggaatcttcgatagtttttaaaaattcttgataactaaaacgaccacctttaatagcatctgctaaatcaggacctgcttttgcaccaaatgcttcaatcgctaaacttgttgcgctagctatatccggcgtcttttcaatttctgctaatgtcttcttaaattcttctcttggatttttaccagctttaccccaattggatatagcttttttcaaaccactgaaggctatttcagtattaacacctgatttctcccattgagagaataaagcgattgattctttcatctcaaagcccatagccctcattggagcaccgtatttagtaatgctatcagctaatgtatcaacacttataccgctagcctgtgctgctttcgctaccatatcaagtacactttgatactcatcagcttcaatacctgcatcacccattgcacgcgtaattaattgaacggcttgtacgccttcagaacctgttatgtgactaaatttcaagaatgactctgtggcactctcaagttctttgccagtgaaacctaaccttgtgttaacttcccctaaaacaccgcctacagtctcagcatctgctggaaagttgccataaacatctttaaatgaattctgcaacttcttaagctctccgccggttgctcctgttgcttgggtaactgtatctaaacctttatcaacttctgcaaaagcttttcctgatgctgctgcaatacctaaaacaggtgcggtaacaccaatcatcaaacctttaccaatggattttaaaccatcacccatttttgttaatttaggtcccatactttcaaaaactttactggtttttccccagccactttctgccattctttgagcttcaacttgagcttttttgaactcttcaaactcagttgttgttttttctagttctttttctaaaaaattcagctcatttgcttgtttgttatattcttgtcgtaatttttgagcttccgcgctgttttcgccctgttcttgagataccttgccatattgcttggctaaatcatcaacgtttttcttataacctgtgatagttccatcaagttctttaatcctttgtttgtaactatgagttgatttttcggtatatttgaagttgttaccggttaactttaagtcagaatttaaagttttaaagtttcgtttgatttctgcaaatgatctatttaaatttgctgcatctaaatccaaacctatagataaaccttttattctttctcccattttttacctcctttctaaaaaagttcaaaaaaataaccctaaccaaacggttaaggttaaaacgcatcaattaaagcctctgctttttcttcagaaatgtcattgtttttattttgatatatggaaagtacataatgaaatggcatttttaaaacttcgttagcgtctttaccattttcaattaagtccatcatgagagtatccatatttttcaacattgctttatatgctaaatcttcaggctttatttcatgttctggataaaatttctagtttcctcagtttgctgaccttgagtaatgaaaattacttgttcacgaagtgcattcattccatcaggtgcatgcatacgttcttttaggtctttaactgtgaattggttatcgtaaatttttacaaccatatccatcaatctgtcagcgatttctcttggtttcatcgtgctattttcgtcctcaatatcatcgattaaatccattgcttcgtatacaatttcaaatgaaatgaagtgtggtgttaagtacgtttgtaatttaatttcatttgctttcgggtcttctactaattgaataatgttacgttttaattttgccattttataatactctccttattttcaaataaaatagaggggttgccccctcttatgcttctacatttattgttatagtgtcactcatattaccaactgttgctttaaccgtagcaatgccttgtgcttccgcagtaacttgaccatcactattgattgatacaatattcgtttgatctgttgtgtatttcaataacttactttgattagatggctctactacaacatttaaatcgtatgtgtcgccaactttaagtgttttaatgctatctggtatattaaccgactttaccgcagtttccgatgaagccggtttcgttacaaagtttcttcgctatcctctgtcacgtttccagtatattcttcgcctaaaattttctttaagaaagcctcttcgcctttttcaccgtctccatcatgatttgtcatgttagctgaatcaaagatatacttacgtactgactttttattatcaactaaagggaaaagtgcctcaccttcaacctcttcacttgagaaatcccaatctttctcagccgtttctccatcgattttaggatttgtaaacataactttaggtaataaaactgttctaaatgtaccgtctctacgctcttgtctgaaccatacagctacgtaattgttttgtttaccttgtttctcttcgtaaacgccatcttcatcataatcttcattaaaaacaattttgcgaatctctttagggaacgcatgcatttgtaatgagattttaccttctccgtctgtattccctgattcaattggaccgccatcagcataagctgttttaagttctccaccagtttcaacaccaattttttgtaatccttttgtttttgtaatatcactatattttaattccgcgccttctttcgttaatttagcgaaacctaaaccagtaatgttaatatacgcctttggcgcacttgcatgttttactgccatttaattttcctccttataaaaaatgccctcgtaaacgcgagagcttctatatgttttaaattcttctatatattccggttttccatttgaaacatttcccatttttagttcagaccataataacttttgaatgcgattagatatcttatttcttatgattctcgcattatattcatcattgtacttaacaaaaacatctatttggacaatataactatatgcacactcatctccgtcagtataagttgtaggtattgggtcgtcgatatcgtcaataacaataaaaggtacatcagtatcttttacattagggtatttattgaacttaatattattgatatttacgtgctctctaataattctgtcttgactaatcacttcatgaactttgtacaaaatatcaatcacaattttttcaactccctttttagcgtctcaaaatacttattttgcccttgtcttattgctctattaacaccgcccatagctttaggtttgataaatttacctgttcctttttgaacgtgtccatattcaattaaatgtacgattttataacggtctttagaacctcgccaataaacagtaattgtacgttttccgtttatccattcaggtttactaaaacttacctcattaattaatgctcccgtatcttttgagggctttagttgtttttttacttcttcaacaattaccttagcaccagctattagcgccttatcttgaacttttaccatctcttttatgccaaaacgtttttctaattctctttctaatgctttatcacctatcactttcacactcatgaactatatcctccacgaatcataataaagtctttattatccaaatctggtgatacttgctttatattcaaacgatttttgaaatatcttgattcaatttcaagataatgttcttcactgggtaaataatcaccttgcggatcacgaatatacaatttaatgtcattttgggttccgtttgagatagcttgttctaattcacgtaaccagacaccatcaatactcgcccaacagctatataataatttttcttctttttctccagcttctggaccattattttcagtatacttataaaaatgaacacgagtatttaaacgtttagttgtaattctaggttttttaaacactttcttcatcttctgatacctccattagagataacgaaaaatctattatttcaggtctgtaattatcgttgaagtgttctaataaatcttgataagcatatctagcgcgtataagtatcaattcttgacctattaaattctctaattcaaaaactccgcactgattttttatacgctcgtacgacatttttaacaactgctttaagtactcatcctctgaattatggtcaatcttttcaagtgatttaaatttgacaagcaaatcatcaatcgtcattgtcttcaccattcaataagtcgacgatttcacttttaaccattgaactagacgctttttttgtaatgattcgcatagttctaataattcttgttttgtcagcttatctaaaggtacgatataaactttgtcgtacttatttttgatttgatttgtcaacaattcaacacgaggattgttatacccttcagctggatacaactcccctactttgtacttgtgttgattgtgctctatgtctttaaaagctctaacaactttaaatttcaccattttatcacctcataaaattttatagtgtttcttcggtaccttctaaagctggcttatgtccttttaaatctaatttccaaacagcagcaactttattatctttcgctttgccgtaagcaaattgttttgcagtgtataaatccatatcatctaacgcaagtgtttctttaaatttctgaacattaataccaccagctaaataaccatcatataaacctttaacgtacgttaaaaccttacctgcttcttggactgtagactcgataacattcaaattaaatggtaaagcagtaacatatacgccatttgcatttaaatgtgtatactgtgcttgaacctcaaaagcatcggacggattaacaaccattgttacattacctttaaccgctactgatttacctttctcgttagttgagtggtatttaaacacttgcgtcaattcattaactgtagcgcgcggattagcaaatgtaagcgtaccttgttcttctttctctggataagcaccctcagttaccgatacacctttttgtacttgacggtttaagccgattggttggtctttaccagtaccttttaagaacgcagtttcaagcgccactgcaaatgcttcttcgatttgaacacgaacaaatctttcaatccacgcaggaccaaaatcatttaaatcttttggtaaaacaacaaacgctgtcaatttattttgaattgctgtttcttcactgaacgcagcatctaattgacctttaatttcaccatagattttaccccaaacggctacgccagaagtttcagattttaagaacttcaaacgcaaaccagcgtttttaatacctaaatcagctaataacggatgattcgtcgtcaaatcttcaaaaattctatcaattgtttcttctggcaaaagtttttcttctttatagttaacgtttttattgatatccatgaagaaacttctttggtttgcactcaaagattgtgctgatttaggtaaactagaaactctttcagcttctgcttttgcttgtaatttagtttcttcaaatagttggttaatcatgtcaccgtacaattcattttgtctttcttgcggttcaccgttgtttactgcattaataaattcgtttttcgcatttgcgaatgtttccgataaatttatagtcattttatgacctcctattttttgtattaaaaaaggaatcttgaaaatccatttgctgatactttactatctgcaacatcgatttctgattccttttctttcatatttattttttcaattactttatttgctattgcgtcaatatcaatgttaacctctggcgttttacttaccaaagctgttacacgatttaatacatctttcgataacacttgtgtattgcttgctacaatttgcatattgtcgttttcaaacattttactatccgcaaaaccttgttcaatggcttcatcagcatttagccacgtttccctagccatcatttctacaagttcttgtttgtttttaccagctctaaccgcatatgcctcagccattatttgaccaacatgttctaatgtttctgcagcatgatttagatctttcgcttctccttgcgcaatacttgaaggattgtgaatcatcattctagcaaccggactcatttcgatgtggtcaccagccattgcgataagcgatgccgcacttgctgctattgctgtgatacgaacattcactttgcctttatgagctcttaaatgtgtatatatttcactaccagctactaggttaccaccatttgagttaattataatatcaacatcttcatcactaaattctagttgtgttaaaacatctttaggacaagtcgaatccataccaagcatttcgtaaacccatttatcttcgttggaaacgatgacgcctttaatctccgctttcatcttcatcaccacctttcaaagtgttttcatctttttctttttcatcattttcaccactgttagctttttcgtagtttttagtaatcaggtattcgtctaattcaggattgtctgatggttcttcacctaacataatccgcacctcattccttgtaaatgaaccagaacttacaagtttgtcaattgcttcagcatattgaagtgggtcttttttattcacaccgacaatttctattcttgtatctttcaaatacatgctttgtgttatgagtttcgcgtttaattcgttctgaatcttttttaataaaggtgttaaacagaacttctcaaatacaagcgtgtttttttccaaatcagctgtttctccgtaaatcaaacctggaggtataccaatcatcaacgcaacattttttattgcatctctcattagctcactcaattcagaaaaaggcatgttactattcttaccaccattagataattcctcataatcaaaaccttctatcaaaggcgcgattgctagttgatttttattaaaagtattgaataatttatttgtgaacgcttgtaatttttctatattcttttcgtcatatgcgctagaggcagatttcaaaatccctcttatttgatagttttttaattgtgcacctatcattcttccgaatattttcccgtaatcttcgaatagactttctacaaagtgtgtcactttattgttgttgtactttaaatatatgacctcttgcattgtgaaagtacgttgataagtataatctttaaccgttacatctttgaatatatcatcatacaaagcgtactcttctctgtaaaagctatctgcgataagtaattctttgctgtcacttactacgattaaaacctcgttatcataaattagtttatatataacttgttgccaaaaactatcgcttgataagtcagtatttggttttatatttaacttgtagtaaacatcattcttttgaattctattaccttccaatactttaaaatgactttgagcgacagctcgcgcaacaaattcaatacaactatcaatcgctaaacgtttcacatacgcttgttgtgatagatcttctatcatatctaaatcaagcatatatgttatatctttcctagttttaaatatcttttctagaatactcatgtctcacctcctctattagaaatctatactcattaatgcatcaagcgctttagacatgtctttgtctactatatcgtctgctctatataatgcgtgaacaaaagccatgaacccatcggtttttcttctattttcatcttttttaatatattctttattaccatcgggtttaacctttactgcaacattattagtaaaccaacgcatcaaaggattgtctccatatattacgttatgtttcgcaaacattgtatcgatacgtggtgcaagtaatccatgtattgcttttggatttctaagtacttcaagttttatgccagcatcctcaaacgcacgtcttacaatatcagttctataattatcagctatgactttttcaagcccatatttttctctagcctttaaaaaccaatcaactatatattcaatttcaatgacatcatcatcgacaatggtcaataatcccattttttcccattctttaataggaggttctaatttgacatcatccaaaaacccttgtcttacaaacgaatgtcctaaccaaatgtaatcatcgttttttcggaataatagccctacacttgcaaaatctcgaatgtttgcaaagtctaaaccaccaatacacatttgattatctaaatttggtatctctctattagtcgctagtatttctttccatggtgctattactttttcaaggtcaacttcaggcaaattcattcgcttagtcatgaattcgggcttatttgaacggttgaatggtaaatcgttatattcttcttcaatcgtacttagcagtgttttagcgtattctgataacggtttatgtaacattgggttcgccttttcccacgtctgtctgtcatcaacttcttttggatcgtctaacttacaataaaaagcaaacaatctactatttttaaccttgccacttaatacacttgcaattttgtgcttcattgcatcgatataaccctctctaacaaaaccatcagtacttatataaaacgttcttctatttttctttttacctaatccaccacgtttgacgtttaccatttcaggaccaaagaaataatgaatttcatcaaaaataacacacccctcacgtccaccgtctttggtttttgtgtttgatgtgttatatcgaataaccgatttagttgcacggtttattatttttgctttactaacttcataaggagcttttggcgttttacccgtcttatttcgtttgttatccattaaaacggttctgatttcatcaaacgatgtttttgcttgatcttcactattagcaacaatggagatgtgatattctttaactccgtgtaagggcgtagaaagaaaatcactaatagcacttattagaccgtttttcccgcctccacgtcccatgaaaatagcaaattctgtaaagaaagcttcatctgtatttttatctataagaaatatattagctatgataaacctttgaaatggtaatgttggaaaataccatttttcaataaatttgatacaatcctcgattttctgttcatcaaaatatacatcatctcgtgaatatatatgtttttgtagataattaaagagatcaattctttctttatttaaaattatctttccttgtttccacaaatttatatattcatcaacgtatttattactaatcataggtaatcatcagatggcgtttctgtgtcttctttctcttcgggcaataaatccgataattgtttgattattttttgatatgcagcatctctagcattaaatagtttggctactggtctttccctttcatatggtggcgccttttcagattgagtaaataaatcatagtcacctttttcttttatgtcttcccacatgtaatcaagcattacacgtagccttgctgcttgaataattaaaccatcaactacttttaatttattgctaggtatgtctttatataatacttgcagcctttctttttctttaagcactaagttttcatcaactataatctccatttcatcacctgccttaaaatggttataagagggggggttatacatggatttttaaaattatcgcgaagtcgagcccctgcccgttccccaagtattttgatcgcttttgatttttttgacccgggggtatttaccatttttcgtctttccatttattttctttttttataaatctcttttcttttttgttgtgacatttaatacatagtgtttctaaattgtttaagtcatgagcaaactccggatgatgttctagcgataatatatgatctacatccaacgacttacgcttgcttttgtcatatgtcgttaacttgccgtctctcttacattgttgacattcataattatctctttctagcactctttttcttgttgtttgccattctttagacttatagaatcgtatgcgttcgtctttagtcatcataatgtttcaccttatataacttaagtagtatcaagactcatctatacttgatgtgtagtaatgtatttactattagtttgaacatgttcatacctcataaataaaaagacacatcacatagtgatgcgcctcttgttcatgcgtcgtattagcatttaataactttaaatattaatctgatactaacataataaactgttttaatgcggacttacatagggtaaaagtccgctacacataaccaatatactttgctaacttatcgatcagtgcattccttctacgtaatatacttgtcttacttgtaccaaagtaatgtgctatatcttcccattcataacaaccaataggacaatcccaatatctaaaccttaataactcaagcgtatcctcatcactttcatctatcaatctatctacaccgttaactatatttcttaatgtattgtacctgttatcactaaacttctttattgcacatcgttcaatcgggttacccggcaaattacttttgccagctcccgcattatctggttcatgactttcaagtaattcatattctcgcatcttcaactctcttcgatagttatcgatgtgctgaatgtattcttcaagctttttgatatcgtgtttctcaatctttatcattcaatgcaatacctccgataatataaattactttttaatatcgttatttattcgctttaattcaatcctgtattcttttaacccgttgtatcctttagttttaactacttcatcaagtagataatcattcatatatctgagcgcttgtatctcccttgcacgatcactattaatactgatacaaactaatagcaatatagcaaatacaatagtcatagtaatccacatcactcacttacctccgctcgaaagacgtaatcactcggcgcctctacatcatcattagccgtcatcataatatatacttgctcagttacatacttacctaactcatacatcgctagtaagaataataatcttagtatttgcttaatcattttttatctaccttctttacttcgtataagaccggatataaatttaaaaagtgtattctatatccaatcgtcttaacttttactttatcacctacttttaacctagcttgtatgtctgcgctatcaaactttcctttgaagaataagtctgagttttcgatgacttgtttatcatctaatacaatatagaatttgtcctctttatcttgtcttttgttatatttatctgtaattgtcccttgatgtacttctttgttttggtaactagccactgtatagataggcaatgcgacaacaagtagcaatgcggttataccgaataatgacagtattccaacaataaagatgtcgaacccatccatatttttaagttttttaatcatttcccacactcccttatattttcaaacaactgacccactttaataactgcatcccttttaacttgtttctcgtacttctctttcgcttcttctttactctctgcctcaacaactgtaaacctttgattactcttagctttagttatgtgtgtatgtttacgtcctgttgaatctttgaatgttgtgactaagtattgtgtcattcctcatagctcccttgaacttgtttgagcttactcataaaaaacattactaaaaatgctattaagatatgcgtcttttgatgtttataagcaaatgtagatatcataaagatagtagcaagcattaacatttcatatatgtttgtgtgtatagtctttttactcttaagaaaaataattgctatgcgataaaagagataaacgccaaaccctattaaaaatatttctaacatgtcgctcacttccccaaaacctccttgactcgatctaagatgtctttacacgtatccttttcctgcgtctgctgttccatcttgtctttcgtggttccttttcattttctttttgtatgcgtcaatgagttggtcgatagaatataagttgtaagctatgtctatcactataacaattgcttgttggtcgggataaaattctttgaatattatctgtggtgtactaacaactgcgtcttgagcaaattctttatctttaaaattaaacattttgtgaaattctgtatctttaaaacttgattcaatcgcttcttttatctcttctgatgacactcctacttgattcgcaatactcaatccaaacgccaacatgtcagctaattcatcaagttgtacgtctaacggcttacctggtttcttcttccagttcttaaacgtttccaatgtattaaaccattcaaagaattcaactacatatgctattttgctatctcgtaagttcagcgttggtattctatcgtcgaactccttttgtatttgtaataactcttgtaattgatcaattgttaatgtgttattcattttcctgtgcctcctctacattaatttcatattcatcataattaaatgatgcttcaaatatcgcaataaaatccgcctcaatttctgcttcttctaaactttcagcctcgatagtctcttcaatcatgccagcgtatgtgatttggacattaaatttcttcattttcctgctcctcctcatatttatagaccacttgacccgtcataatccctactgcctcatcaagaccaatatcttctttgagtgcatcttgcatagcattaggtaaacccttaagtatttcatcaaacgcttgcgctttcttatatacgtcctcaatctcttttagtaatccctctgtgtcattaccgttatacgcactagcacttataacggactgttcaatttgttcgcggttattcatcatttccatctcctctaaaataaagttagttgcttctgtttctcgtattccaaaccatgttgctttatatatatttctagctcttcggctgtatcaaacgtcttctttacgccttgccaacctggtacgatatgcccgtgaaagtaataattgccgtttgctacatggatatgtgccactcgttcgttatcttgatacagatatctcttagatccaaagaattgatttaggtattctttgcgtgcgttatctgtcatgatctacttcttaactttcacgaatatgtcgttttccatcaggtagcacgcataacgtcctcttggatgtttctgaggcacattaaacaaatgtggcttctttcttcttagctcagcctctttctttcgctttctttccaatttgcgttcgagtctagcttgttccagtctttctattgttttcttttctctgtactcgcttaaacgcgtaccttctggtgcgtccattgcttcatgtagttcccaaccgtcttttactctcttagaaaccattccagcggttataccgtgactttctattaattccatttcagatttggtaaacctatatggtttatcatttattgttacaatccttgcttttctcgccattttatccacctcttatatttcttctattcgtatgattattttgggctcaattccataacgctttgagctagttatttctgcaatttgattgtcatctttccacaaataattgttacaagcgtctagaactgtcttcatcaaattatcgatatctggtttagttacttttaattgtccaatcgcttgagttttctttttcttcgaccatgatttaggtggagtaaagtaaaactctaattcaatttttaatgcattttctagatttagctttggcatttgattttgtaaatattttttatgttctgtatattttgtaggcatatatgtgtgtgcatatctaccttttgtgctaaaacgcggtcgaggcgagcccataggtgcctcgaaagtttcgttaaatttaatttctatctccatgtaatccctcatatatattcaaataagcttgtttggtgtcctaactccatttgttcattatcaataagtgtttttaattcataatcatctaagtaccaacgtcgaccattgaattttgtatgttttaatccaacaactaaatgccgtccatctttaaaatgtggtgtaactgaaaacattttgttgccgtcatgatcaaatagatagtatttatcaaatgcatccattttcaatcactcccatttgctatttagacgcttaataaaagcttctctgtctttctcaaggttttcatctacttccggcgttttcgtttctctcgtgctgtctgtgagccatttgggtgttttttcttttgattgtttaacgaaaggtttataattttgttttttgctttcaagttgttgcttttcaaatgcacgtacttgttcaatagatttcaagtttgcattaagccaagtattcaaaatgcttttagcatatccccaagtaaccttgtttctgtctttagcgattttaagtgatgcggtaactatttcatctgaatcattttcaaatgaatcaagatagtaatttaaatcgtctaaattgtaaggagttatgaaaccgaatccgttatcttggaagaagtcgaaggcggttaccttcttcttctcattattcacattcttttcattattatctttattatcattattgtttgtgttggtttgatgttgttttgatgttgggttgatgtttgactgatgttgttttgatgttggtttgatgtcgttttgatgttggttcctgccctgctcactttgataaaagtcataattgacaatggttataagggtatattttgatgttgttttgacttctaacattccatcactctcgagtaagtcaaggaaggttttcactttaaatcgtgaccagttaaaaaggtcagacaaggtcaaaatagatgttaatctttgtcctctttcaacggttacaatttggtttcctataggcacttttgcctctgaatgattcgcttccatgagtaaatatatccatgcttcgaactttgaaaatgttctcttttctttaaatagccaatgattttgaattgagcgatcaatacttatccaaccagtcatatacacacctcactttcaaaccggttaaattagaatggtaaatcatcatcatttagttcaatcggaccatttgcattcgcaaacggattatcttttactggtttgttatttgaatattgcgattgtccacgtgtttgttgtacttgttgttgatataaatcttgttgagtgtcatttgagtttttcggttctaaaaattgaatactatcagcaataacttccgtaacgtatacacgttgaccttccttattttcatagttccgcgtttgtaacctaccatctacgcccgccaacgatcctttagataggtatttattaacgttctctgcttgttttttaaatacgatgatattaataaagtctgcctcgcgctcgccttgtgcatttgtaaatgtacggttaactgctaatgtgaatgatgctacatttacaccactttgagtggtccttaattctgggtctctagttaaacgaccaactaatattgttctgtttatcatttataaacctccaacataaacgggcacgcccgtcaccttttgtatttcacttttaatgtattttgcatttgaattttggctacttaaatgaattaaatgtatttcttcgagtctagttaaatcatttgcttttaacattccgatagcatgttctaagctaaaatgagactccataattctatttgctaatgtgctgtgcacactgccgttttttatgttttcctgtatttgttcatagatataattaacttctaacatcatgtgcgtaatgccgttaaatttgtatttcaaatactttgtatcagtaacatacagaaccttataacctaatgtactttgtaataagaaagccacaggctcgttagcatcatgttcgatgtcaaacggtagaattgaccatgtgcctattcgcagctcttgctttgccttaatcgtgcataagcgatgactttcaaaattcatagcttgttgtgttccagcagtcatatagctgattacaccattgtcgacaaactgctttgtatactttgcatgatcaccatgttcgtgtgtgataagacaccctgctatatgtcttgttttatatttgaaatgcttttgaacacgttcaaattttatacctgcctcaaatagtaacgtagtacgtccatcatttaagacgtagcagttaccacttgaaccagttgctattgtttcaattaaaatggctcttcttcgctttctttttctgttgcaggttcttttatttcttcaaagtcagatacatcaataggcttatcattttctaattctgtgtattgtgcttcttcaagaactggttgttcaaagtccaattgttcttgatttgcattttcttcaacttctgcgtccaacacttctttgcgttgacgttgttcggattcttgtgcgtatttgaaaagattgctatctgttgatgtgttgatataacgtttagcagctctattgataactgtttttttagccatttcttctttgaaattattatgtgttttagaattttgtaatgctttttcatctttaatcattgatgactgcatccatgcttgtttaatttgttcaatagtcatgacttcaatatagttatctcgtccatcattaaatacgattgtgcagtacgcaccgataatgttttctttgtcgatgttaaagaagtcttgttcgtgtttaatcgctttgatacgtcctgtttctcccatttcttgcttgaatgtatcgcctttataaatcacttgagcaacaacatcttgagcacctgcatcacgttttaacatcattacattaccgtgatagctacgttgtaactgcattttgttgccgtaaggaataaagtagcattgatttttagctggatttaaaccttgcgttaccatgtctaataaggcatttgctttgcttgtatcgttacaactcattaatttgttatcttggctgatttgtaaccatgcttgtttcatggcattacttggtgaataatcatttggcaattccaaattgccttgtgactctaaaactctcactttgtttaatacgttgtcagatacgttcttttcttgtactaattgttgttcaatagtttgtaatttattattttcagtcattttatatagtctccattcttaattttttatcttgttcatttactatcaattgaatttgttgtgattctgttttgataagctctgttactgattcagcattatcaataaatattggcgctgtaactttaaaatgttttgatagtgtgttgatgatatctaagccaacattaattcttgaggcgttatttaaaccgctgtcatactcgacaccattaaccgttgttgaacatgtttcttctaattcgccgttaactaaggtattgaatagcttaaattcagcaatatcaaattcgttattgatgttttcagtaagcattttgacttttgttgttgtaaattcttttaagatataaaggtcatgtgaatacttttctttttcatccaataatctgtcttcttcatttcttaattcagaaataacatcatctagatgtttatttgatttttcgattgatattgacacttcaatttctgatttttcttgagtaagttcgcttattttgtcatctattcctgaaactttatcttgaatagttttcctgatgttagagcgtttttgattaatctcatttatctctaacattactgctttgtattcgtcagtttgcgtaacgtcaacgtgagttgttttcaacttattaattttgttttgtattcttgctgaacgctcttctgcttcgttgattttaatttgtaaattattgttgtcatcctctaatttctcgataattggctttattttcttgccctctgaaataatgtgattgatagatgtttgtattgtttctaattctttcgatttgtttgcattgaatttctgcaatgctttttctcttacctcactcacttgttcagctggtaactgttgaccacaacaactacatacattgtcatcaagatattcaaatttttgatttttagctttttctaaatcactttttaatcctttatgattttctaataattgattacgtcgattttcttcatgtgtaatttgttgtttgttttgctttaatcttgttttaagattcgcaaccgttccattttcaacgtgtagctcatttgttaaagcatgtattttgttctcattactggcgctattattagcttctatgcgcttcaattctgattgtttatcagctaattggttacgcaaattaatttcttctgcaccgttttgaatatctatacgctcattttcaagttgctcaatttcttgttttatgattgtgtgtctatcattatcgaattccggtacatcctgcttattttgttgcgtttggttaatacgtatcggaatatctttgatatctttgttaatctgttttatcttgtctgtaagaatctttttctttgtttcaatttcgtgatctccaagaatattatttagttctttaaaatcatcatttgttttaatgacatcctcatcattgattggtttagcgatttcaaacaacaaacttcttcgtttcttccaatctagtaagttaaatgcttgagggttcgtaattaacttgaatacatcttcatcaatcagttcatcaatacgagctttataatcctttacttttattgattcatcattgatatattgtttcttcgttcgacttcgtgagtattccttgcgattcgttttttgatttattgtgtatttaggatgtgactcttttttaaaagtcgtaatttttccgtcgatttcaaattctgcgaaaacagtcggaattaactcataattttcttcgtttttttcgtttaaaggtacagggttaaatgatttggttgaaccgtctaaacccttatcgaaaagcagccattgtaatgcggttgctgttgtagtcttgccagtcgcattattgccgtatatttttgcatctttaccgtcaaagttaaatttttcttctttgattccagcaaagttcgatatagttaacttatttattttcatatctttcctcatgctccttttttaatcttccgatgacctcttagcacctcgataattaaattttttattcgttcatggctgtctggattgatttcatgtatctgcacaagcttattgtttgttttgtaactgtcgtgatagtgcaagaaattaatcgataagtatccgtgatgattacgttcaatttccaataatgctcgttggtttgacaaagtatattcgtcgaataacgtcttaaaaatattcaatatatttctttctgtatctctcatgcttatacctaccatttcatgactaagttaattagtctgtcctgttcatctgtgttattttcaatccattcataaatactttgtttcaaaatatctaaagctgtgtatagatcgttctcgtcagaaactagtagcccgtcaattgaatttccttcatgatctaaaacgactatttcgacactatatgctcgcttcttaactcttaattgaaaatcaaagccatctacattaaatatttttcgacatacgtcacccgttttgtaatacattgttttagtcctccttgtcgtcatctataccgagaattttttgtgatttacacatttggagaacattgacaatatctttataactcttagtgctatccaataagtaagcaagatcaaaagtatgaccaatcacagaacttgaacctgctaaataatctccgtcgataactcctattgatgagaaaagcaaaatatcaaatttactttctcccttaatttctttcgctaattcatacaattctgccgttttttcagataataagtcttttatttcttcctgcgtcatgtctttataatttttagtcatggttgacttcctccgtttttcgttttatatttaacttgaattttatttcttaaatgtttgttactgttacttgttggcgcaagtagcagtttttttattcttcataaaagtattccttatagaatatgaatgttgcgatacttgcgaatcctgcaattgaccatgctgtagtgaagtatagaaacggcataagtacaatcgctaagactgtgaagcatagtactgctactaggtagcttttataagttttactcatttgttgtgccctcctttgtaaatctcattaaaatgttcatctacaaacttatgcatccttcttgcgttaaacctccaacgattaaaattctcatcaggataatgtacgataccttgtgctcttaactctttttcgagtctagggtgaaataataacctgtctttgattgtttcatcagatgcaatttttaatttcttctttaagtcgctcatgttccatacagggtctaatgagtaagctattaactcttcatattcatcttttgtgataagcacgtgtgtttcaggtattggaactgttacgtttaaaatatgtggcatttctatctttcctttcgtgtataatgttgttatcaacctaaggtagtgataagtatgaaattagatcatgattgtgttagacatcttttgttagaaattgaaactaataaaaagattggtgaaccgctcaccgaatacaatttcaaagataatgttgtatttggaaaatatgattttgaaactgtaatatatgcattattaaaactggaagaagcaaagtatgttagtgttaaattcggttgggaagatggacatatttatggttatacaattaacgatataacttggtcaggacatgaatttttagataatatccgagacaatcacacttggaaagaagttaaaaaagtcgcaaacaaaaccactagtatgtccgtaacattgctaagcaaattagcttttaattatctaacacaaaaatttaatctaacttaaattcttttccatctattaatccataaaagttattttttaaatgcggatgtctttcaagcgtcatttcaataaaacgctggtctatcattaagtcgtagccatcgttgtattgaatattaacgggtcgtctattaccttcttcgtcatagtagtaatagatgacttttttgttttgagcttgcattgttcgttcctcctattaagatgtttgtttttctcctaaaaacttattaacaaagtattgttgtcctttgcctgttacttttggcgtcttactaattgatgtgtgaccgtccgaatgtgtgattgatgtttctttaatttcgaataactcacgttccattgaatactgtgtaggcatgttataatccacacccttgcgtttaataaggaatccgttttgacgtaaccactcaaacaatctgcgttgcccgatgtttataccgttttgtttaatgatctttgctaactctccaactaaaattgatgtcttagtagtagctactgcatctgcaaatacaatttttggtttatcacgttcaatctttgtttctaattgattgattgtgttgttagcaatttttaaagcacgttgcataatcatttctgggctattccatgctttttcaacttggatgaagtattgtcttgcacgtttgccaggttcactacgttgaatcattgcaatctcttttgcagtgtctagtgtgagtgcgtggtcagtttgattctgacgacctcctagtgggttatggacaaaaatgtccgtgactatataatcgatattttcttcaaatccgtaatcactcattctttcaaaccattttttgtatggagtcttaacctctaatgcttgatgaagttctcgaccgctgattgcgatttctccattttctttttcttgtatgttgaacatttcgcctatgttcgattttgtttgtaatgcttgcatattgtttgtgctcctttctgctatactcctattaaggaggtgaatgacttatgactgatgaagctaaatttgtccttttacaactttattcaatttaccttgatagaattgacgaaggtatgtctaaacgttctgcatcttatttcggtagtgatgaatcctcatttaacgctttctttttaggttttaattttgaagactatatcgatgcagttcttgaattaaagcatagagattttgtaattgcttctgctgaagatggcggttttcttgagatggctctttctcgagaaggtatcgcctactcagaatcagaatccaaaaaagattacaaaacacttatgggtttaattagagatttgaaaaaattaataatctaaaatccaatcatctgctattaaatcgtctgcgctaggctgccaccttccggcggcggtttgtctttttttcttatagtgtctagatacgactaggcattgataacgctgcaaattagttggtaatatcccatacacatcttgattctctctccttatacttattcctttctccatcgctagcttcgttgcttcttgaatgttcatttgttattcctcctattaagatgtttgttttttttaaatgctaaaataattgatttctttttatcattcgtaaatacgaaattttcgtattcattacctaaaaaaatatcatcatatttaacattaaaagcactcatatacttagaaagtaaactatctttaatgtttgtagagtctttttccatattttgaattgtacgtgatgagaccttaaataaatctcctaactctttttgagtcaatccgtaatcagtcctcaactcttttaatgttttcatgttgtcaccgcctttcgtaaacctaatataatacgaaattttcgtattgtcaacattaaatacgtttttttcgtaaaaaactttactatgatatgaaaatttcgtataataagaaaaaaggaggtaagtaatatgaacaaagaaagaaatattattatagccaaaaacattagaaaatttctcaacgattcaaatatgtctcaaaagaaacttgctgaactcattaacataaaaccatctactttaagcgattatttaaatttacgttccaacccctctcacggcgttatacaaaggatagctgatgttttcgaggttggtaaaagcgacatagatactacatacaaagacgataacgacatcacttccatatacaacaaactcacacctccccgccaagaaaacgtacttaactatgcaaatgaacaattggaagaacagaattctaaaggagataacgttgtagatattaattcatataaacaggagaaaactccagttaacgtcaatggttgcgtctctgctggtgtaggagaacgtttacacgatgaaacgctatttactgaaatggttaaaggacctatccccacacacgatttagcgttaaaagtaaatggtgattctatggaacctatgtttaaagatggcgaaatcatatttgtggagaaaactcacaatataaagaatggacaaattggtatattcatcattgaagaagaagcgtacgttaagaaagtctttgttgaagatgatagattgactctagtttcactaaataaagattacgacgatctacacttttatagaaatgaaagtgtgaggttaattggaaaagttattttataaaaggagcacttgcaaatgaaaaaatatgatattgcagtcttagactttgaaactatgaatgaacatatgaacagcccttgcgaagttgctgtatctttaattaaggatttatcaatagtaaaagtttattcatcttatattaatcctcctaataatagatataacttgaaaaacgctaaaatacataaaatacctgaagatgtcatattaaaagcacctaaatatccagatatttaccaagaaattctctatcttttaaaagaatcacatttaattattgctcataatgcactttttgatatttcagtattaaaaaatactaataattattatgacttacctgttccaaacttcatgtatgtcgatagtataaatatctttagaagcttccacgcaatctctagttttaaattagaaaatttgtgtagcttatatgatatcgataaagaaaaattacattctgctaaatttgacgtgctagctttatcgaagatgttgatatcactcgctaaaaacaatcagcattatagtgtattaaaattaatacattatatgcctaagcaatacattagatttagcaaatattctaactctccaactaaacttttcgattcaggatttcaaaaaattcatatgaaaatatctgagattaataaaatagaagtggaaagtgtaatccctattttaaaagataaaaatgttgtttttacaggtaattttgacactgaaaaacaagatttaatgatattaactagaaagaaaggagcttatatcagaagtgacgtaactgcaaaaacagatattttagtcgaaggtgttcaagatgataaatataaagatgtgaacggactagtttcaaaacaacgaaaagctcgagaatatgttggaaatggtgcaaaaattcaatttttaaatgaagaagacttaataaatttaataaaggaataataacgatgatcaaaaaaatttttacaaaaaagcatgtattcttagttatagaagatgaaaaccataatcacagtgatgctgtttttggaaaaagtatattactttcaatttacgtcggtgtgaataaaaagactaattctaaatcagggaaatttatataccttgacagatctaaaagaatcgttagacaatctgatatcaccaaaatagaatcagctaacgaaaatgatgtagatttttataatttactgaagaaagaaaaggaaattgtttattccaaaaatatagtagataaatacaatttagcgaactatataatttactacgaagttagtactaaagaataaaccaatccattatttcataatactaaccttaaatttacagaggttttaattatgaaacatgaaaaaagcaatcttaactttaagtcttatatttattacctactacctcacttttaaatatatgtggattaaagaattgaagtattaattatgcttatttaaaaaagacgtctatttcagcagtgtttgaaaggaagtttataatgaaaataactaattgcaaaataaaaagagaaactgtaatatacgaagttttaactagtggtaatcaaccattcacttatgagttacctaaagatttatcgtcacataatgcgcgtaaatacttggaatttatttcacaaaaattagatggcgataagttaaccaaagaagattcattatgattttactaaacaaaaaaacgcctactagtgtgaaaacgtattgattaatagcgcctatatggagttttaatataaaaagtaagcaaaggagaaatgagaatgaaaagattgttaggtttattattagtgagcacgttagtgttaagtgcatgtggaaatgatgagaatcaggaagaatctaaaaaagaagttaaatcaaaagaaaagaaaattgagaaggaaaaggaaaataaatcgaaaaaagataaggaaaaagaagttgcaacacaacaacaaccagacaatcaaaccgttgaacaaccccaatcacaagagcaatcggttcaacaaccgcaacaacagataccacaaaatagtgttcctcagcaaaatgtccaagttcaacaaaacaaaaagcaaaaagttgatttaaataatatgcctcccactgatttttctacagagggtatgtctgagcaggctcaaaaacaaattgaagagctttcaatgcaaaaagactatcatggtctgtcacaaagagaatacaatgatagagtttctgaaattataaataatgataattgattccacagggtagcccgcctacccttattattttttgccaattttgaggagggaacgcatgaaaacacgttgttacgatggtaaaaaatggcaatatgaatttaagcatgaaggaaaaagataccgtaagaaaggttttagaacaaagcgtgaagctaattctgctggactagacaagttaaatgagttaagaagtggttttaatatagataactatataactcttgaagaatacttcgaaaattggattaaaacatataaacaacctgttgttaaagaaaatacctaccgtcattatagaaatgcattacaacatatacaaaaacataaaataggtaaaatggagttatcaaagataaatagacaagtttatcagaaattcataaacgactattcaaaagaacacgcaaaagaaactataagaaaaacaaacggtgctattcggtcagctttagatgacgcattatatgatggacttatttttaaaaaccccgcttataaagttaattataaagccggaaaacctacgaagtcagaacaagaaaaattcatctcggtaactgaatatgaaatactaaaagatcacgtcagaaagaagagaactcgttcatcattagcgctattcataatgatttgtacgggttgtcgtgtcagtggtgcaagaaatataaagattgagcatatcaaccaagtgaaaaacactatatttattgacgagcgaaaaaccaatacttcccctagatatatcagtatcgctaaatctgatatgaaacacattatggacgtcataagtacatttgcaattagctatgatggttacattttcaaagaaggcggatctataattaaccttcatgctatcaataatgctttgaaatcagcctgtagagtcaataatataccaattattacatcgcacgcattaagacacactcattgttcttatttactagcaaaaggtgtatctatacattacatttctaaaagattaggtcataaaaatatagcaataactacatctgtgtattctcatttgttagaagaaaaatttaatgaagaggacaaaaaaacaactaaaattttagaaagtatgtaatttagggacccattagggactccaaacccaataaatactgttgttacaaggtttctatgtatccaaactgggggcaatataaacgcgctgatttaatcggacaatcttcttatattaaaaataatgatgtcgtaatattcaatgaagcatttgataatggtgcatcagacaaattattaagtaatgtgaaaaaagaatatccttatcaaacacctgtactcggccgttctcaatcagggtgggacaaaactgaaggtagctactcatcaactgttgctgaagatggtggcgtagcgattgtaagtaaatatcctattaaagaaaaaatccagcatgttttcaaaagcggttgtggattcgataatgatagcaacaaaggctttgtttatacaaaaatagagaaaaatggtaagaatgttcacgttatcggtacacatacacaatctgaagattcacgttgtggtgctggacatgatcgaaaaattagagctgaacaaatgaaagaaatcagtgactttgttaaaaagaaaaatatccctaaagatgaaacggtatatataggtggtgaccttaatgttaataaaggcactccagagttcaaagatatgcttaaaaacttgaatgtaaatgatgttctatatgcaggtcataatagcacatgggaccctcaatcaaattcaattgcgaaatataattaccctaatggtaaaccagaacatttagactatatatttacagataaagatcataaacaaccaaaacaattagtcaatgaagttgtgactgaaaaacctaagccatgggatgtatatgcgttcccatattactacgtttacaatgatttttcagatcattatccaatcaaagcctatagtaaatagtgctcaactaactaataactcgcttcgttctaaaagttcgaagcgagttatattgttaaaatttgaattgacttacattttaataaaatcatcttaacaactttaatttttcattaatacaagtctttactctacactcaaacaagattcatacactgcacatcataataaatctatctattcaaatataaataaaagttacctactacattctatgtagcaggcaacttttattacttatttcttttcattatcattaagtacttttacaaacttcacattatgtgtcttccaatcaacttcatataatgctgataatttttcttcttttttatctacatggttttcaccagaccaatagccccagaaaccatgacgattccaatctattttaaactcatccattgatcttttataatgaacaacaaattttgatttaccttcatcttttttatcatgtgacataacagctaaaaattctggattaaacccttcagaaacagttacaggcatcttattcttaggagtaaaattatctttcgcccataaattcccatttcgtgttaaagaaaagatttcacttttagttctattatcactatcattagttaattgtctcgtatggtcatgtcccatattatttatcaaatgtgcttctactttccaacctacacctttatgtgacgtagattgatcaagtaatgtacgatacgatggttgttgataactaatcgtctctgaataattactctcttttgtaatatttccagttaaccctccacgattaatcgaaaaatctccacctgttttataaccatacgtatatttaacttctcttgattcatcctgattttttggtgcaaaatcagtcacatttgtattattgttgtcatcaacattttgaattgaaactgaataagatccaggccatcttaatgtactattccaataaccatttgggtctagaattcttaaaccactacctattgttcctttcgctttaataaatactgtttctttatcataattaggttcagttaagaagttaaattgtaagctttgagtaatatttttttgactatcacttgttgtagctgtacgtgtatacattttagtatcaccatcaagattcttctcagaaacttgtttgatttcagaattaatctttgcaaatgaagtagctggtaatacagtgaaagtagtcgatagtgctaacgtacaaattgtgatatttttacatagttgtttaatcatttgtaatccttcccttcgattttatccttctctaaatgatttattatcagagtatttatcaacgactttaactgttttatttttccaatcaacttcataagtgacaattaatctttgaccttctttatttttttctaaaattggaggtgcataatgtattccaggtctgtttttcaaaatatcttgatttcgtgtgtatgttacttcaaattgcgttttctcatttgacttttcattagataaataagttaaaaattctggattaaagccacttcttactaatgctgggtatctatattttgaagcaaagcttagttcagggttttcaacagtagcaattctcgtatttctatagaataataattcatcatttctatttttcacttctccaccatacttcaagtcattcgcaataactgaccagtgtacatgccagttattatttttaccgctggcaattgtgtcataattttgctgattataactaatcgttttggagtagctatttgatgaagttcgtccaatacctttcgttgaatcgaatttaccacctgagctatatgaaaatgtactgtctactttcgcagttgaaattttatttttcggcaattggtctaatatttcagttttacgatttctttttacttgaaaatctacatggtactcacttggatactttaaccaatttgaatttttttcttctttatgagattcaaactttaaatttgaatgaattgagccttgttttttaacaagtaatacattcttgtcataagttggatcatcgataaagtcgaattgtaaattttggagtatatttgttttctcatcatatacagtttcagttcgttttgtgattttaccgtttttcccaatatcatcaggtactgttgaatttttatctttattagtaacattacgtttctctttttgttgagacttatcaacatgttctttcttattttggtcttgcgagtctttatgagctgaatttgcttgagtcgttgctgctgataacaataaaattgcacatgataatgatgacgctattaaaacacgttttttatttttcattgttataaccttctttcgtatgattgatatttgttgatatgtatcgacatgtgaataatatcacaaaaatagagaatatatatttaactatttattaaatgattttgttaatattattaaatactttatcctctttaaaaataatgtgtgtacaaagtcattaatttagtaaatatttttatttagtagttaataaccatcgatttgaaatttatatataattattagctaaataatatcctgcatctttctcatacaatttactataaaattaagcatacccgatatcagtgttaataagatcgttgatactagacagttaatttcatagaacgaaatcaaataacacgctactttctgcattttaaattatgtttaagaataaaaattatgtttatataaatatatatactactttgaaaaggtgtgagcttaatgacaacttttagtgaaaaagaaaaaattcaattactagcagatattgttgaactacaaactgaaaataataatgaaatagacgtttgtaattatttaaaagatttattcgacaagtacgatattaaatctgaaattttgaaagttaatgaacaccgcgccaatatcgttgcagaaatcggtaacggctcacctatactcgcattgagtggtcatatggatgttgttgatgcaggaaatcaagataattggacttatcccccttttcaactcacagaaaaagctggcaaattatacggtcgaggcacaacggatatgaaaggcggtctgatggctttggtcatcacactcattgaattaaaagaacaaaatcaattgcctcaaggaacgataagattactagctactgctggcgaagagaaagaacaagaaggtgccaaattattagctgataaaggctatttagacgatgtcgatggcttaattattgctgaaccaactggatctggaatttattatgcacataaggggtctatgtcatgtaaagtaactgcaactggtaaagctgtccatagctcagttccatttattggtgacaatgcaattgatacactgcttgaattttataatctatttaaagaaaaatattcagagcttaaacaacaagatactaaacatgaattagatgttgcgcctatgttcaaatcattgattggaaaagaaatttctgaagaggatgcaaattatgcatctggtcttacagctgtatgttcgattataaatggcggcaaacaatttaactctgtaccagatgaagcttcacttgaatttaacgtaagaccagttcctgagtatgataacgactttatagaatcgtttttccaaaatatcattaatgatgtggatagcaataagctttcactcgatattccaagcaatcaccgacctgtaacaagcgataaaaatagcaaattaattactacgattaaagatatagcttctagttatgtagaacaagacgaaatatttgtttcagcgcttgtaggtgcaacagatgcctctagtttcttaggagataataaggacaatgttgatttagccatttttggaccaggtaatccattaatggcacatcaaatcgatgaatatattgaaaaagatatgtatctgaaatatattgatatttttaaagaggcttccattaaatatttaaaagagaaataagaacgatgctgtcagctgccctattcgcatgctggcagttttttattgcgaattttaagttgatagaaataacgatgaatattgtttgaatgtaaatattcaaatatcaacaagcacattttcattgattaagtgatgtaaaactgaaattattgtgctgatttgtcatacatatattgactaatggtcatataaaaagatagcttctaatagttacataaaactcgtaaaaaccttctcgtaaaaggaatgggacataaatccctagaaaacagcagctcaacgagctgtaaattatcaaatacatttgaaaaaagctgatttctatcaaataatttatagaaatcagcttttttacattgtctaagaacttaatgtctctgtctctttggaactttatatttcataagtactattttattgtttaaccttttttttaaataaggtataaatctacaatatccaaataagccccatcgattcttataatagtcaaaataattatattcatgtattactcttattgtatttggtaaaatttcattcaatttttttaaatcattgtaaccatatttaaaaacaggttgtgaggataactttgataccgattgatgtctctttgtattattcgcaattgtttttgagcaaaaattcaatcgcaaatgtcaaattatgatctcccatctttttgataatagtgtccaataattgagtcattacactctcatcaaaatacatcaatacaccttcaataataaacaatatatctgacttactattaaaaaatttataatttttgacatcatcaatccaactgtaatctagcatagatttagatatcatcttataactattactttctttaaaaaatgtttttcgtatttctattgattctggtacatctaaatctatccatgatattttttctttattaaatctttgaaaccttgtatctaagccacaacctatattgaccacgattaaatctttattatccttgataagcctcttagtaacacaatctattatcacagtacgtatactaattccaatttgagacatgtcatcacatgtaacatttttgtacatatcatctaaaccatcaaatatttttttagatagtgcatcttttattattggtttttcgttttcgtactcttttgctcgagctatcaaaggaattaacattgattcgggaattccaaccagttgcttcatttaatcactccttaaaaacattagtaccaatgcataagaaaatttttacaacttatttctattattttttatttaaaatttctttttttaatttacttctcaaatgttctaatgtaataggatctgtgaaccaataatcttctgctttatatgaaattacatgtcctttttttacagcttcaatattctgccatgtatgtgttttttcaaaatcaaattttccgtacgaaggtttacttaaaaatatataatcaccagcatatttactaatattttcttttgaaatggaagcatagccttttttatcttcttgtaatttatctttatattgctttgtcattggcataccgaatgcatcatgaacaatatccaaaccacgaccccatgtagagttatatatgtatatttgcttttcatctggttcaaacacagatgctgttgcttgaccaattttactttgaatttcttttttatcttttctagttttatcgtcccactcttcaatccattttttagctttatcttcattattagtcaacttgcctatttcttttaatatttctttatgattgtatttattgtatgtatatgggattgttggcgctattttttggtatttttttatatttttatccatagcatctacaacaattaaatctggttttgctttagcaactctttcaacatcattttctccaatataatcaaccccttttaaataaggttttaaaattgaagaatctttagttatatctgaaacagcaattggtttgattcctaactttataaaatcaccaacataaaatccagttaatacagcaactcttttaggtttctctggtactttcagtgtttcaccattttcaattttatagtctgtagtctttgtcgagttacttgttttatcgacagatgctgaacacgcagtcaaaataaataaattacataataaaattccaattaatcttttcataatatcatccttttgttttttaattgatattcattttcaattaaaaaatattaaaagaattagtcaacgcctgttagtaatacacatcagtaacatttctattttcatttatgatattatctaattattaatttataatataaaggagtatgaaattaaaatgaacaaagtccacaaacctttatatttttatttaatgcttttcttctctacaactatcataggtgcacttttattgtatttacctttcactggtaaaaagccaatatcttttttagatgccctatttatagcttcaagtgcatttacagttactggcctatccccagttgatataggatcacagtttaatatacttggtgaaatagtaatactattattaattcaaataggtggtctgggtatcgtgaccgtaaccctattgacactagtatttttaaatagaaagatatcaatgaaaaatagattcttgattatggttacatggaatattgacgaacctggtggtgttattaagctaattaaacacttggctatttatagtttagtcactgaattaattggtatgatttgtttgtgtttatcttttataccaaaatttggtataggcaaaggtttatttttaagcttatttacatcagtatcagcttttaataatgctggatttgccctttttaagaataacttaataaattattctagtgatccaattgtcattattacaatctcaatactcataatatttggaggtattggacattttgtcgtaatagactttattaattgtaaaaaattgagtaaattatctttacattctaaattagtcttaactacaactagtatcctaataattataggagctattacattctttttattagaacagtttaatactatgcaacatatgggactagttgaaaaaatcggaaattcttttttccaatcagtaacaacacgaacagcgggttttaacagtattgatatagcaagcattaacaaatctaccgccttaatgttaatgttacttatgtttattggtggtgcccctctcagtgcagctggaggaattaaaataactacttttgcagtggcgtttatatttgttctaaattatatacgtaaagaaaataatgtttcagtattcaataaagaaatatctgacaaacatataaaactatctattgttaccattaatatctcatttctatttatcagtatcattacttttatattatcgataattaatccgaacatatcattaatcaagttattattcgaagtggtttctgcatttggaacagtcgggttaagtatgaaccttaccacagaatatcatggtattactaaaataattattatattcgttatgctttgcggtaaagtaggactattaactttattaagaacatttataccaccaaaaagtcctaaaaattaccgctacactaaaggacaaatttatctataaaataactatccatctttaacaagaaatgaactagtgttttaatttattacatttaaaaaactacctaaacaggtagttttttgttttttatttattttaggcccattaaatgtcttatgtctttaattaagtaaaatgcacaagtacacctttaaaaagatctactcaaaactaaactatacctagttaaccgcttgtgattaagaaattttaaatgtggtttcttttaattatgtcaaccacccataaggattttaatcaagcactcattcattcctgcactcgcaatatgcattacttatagaagttgatgtactctcatattaagggcaatacaataacttccgcaccacaatgatttaagaatctcaataacacatcagcacataataaagacacctctcataagtttagtcaactaatggaaggcgtctcgtaattaaaatatatttacgtgcattataatttgtacttagaatgaatcatactcgtgcataatgtaattttctagttagtcagaactataaacagttttacatcattcctggcatgccacccatgttaggttggtcattatttttttctggaattgatgctacaaccgcttcagtcgttaagaacattgccgcaacacttgctgcatgttgtaatgctgagcgtgttactttagttggatcaacgatacctgcttctaacatattaacccactcgtttgtagcagcgttaaaaccaacacctggttctgcatttttcaagcgttcaacgatgacagatccttctaaccctgcattttcagcaatttgacgaactggtgcagttaatgctttaagtacaatatttacacctgtttcaatgtcaccttcagcttcaatttcacttactttttggtaaacatttactaatgcagtaccaccacctgcaacaataccttcttcaactgctgcacgtgtagaatttaatgcatcttcaatacgtaatttacgttctttaagctctgtttcacttgctgcacctactttaataactgcaacaccacctgctaatttagctaagcgctcttgtaatttttcacgatcaaagtcagattcagtttcttcaatttgagatttcaattggcttacacgtgcatcaatgctgttttcgtcaccgtcaccatcaacaacagtggtattatctttagttacttctactttacttgcagtacctaacatatcaattgatgcatcttttaaatctaagcctaaatcatcagtaatcacttgcgcaccagttaaaatagctaaatcttctaacattgctttacgacgatcaccgaaaccaggcgcctttactgcaacagctgtaaatgtgccacgcatacggtttagcacgatatttgttaatgcatcgccttcaacttcatcagctacaattaagattggacgattagattgaaccacttgttctaataaaggtaagatatcttggaaagatgagattttcttatctgttactaaaatgtatgggcgttctaattcagcaaccattttatctgaatcagtaaccatatacggtgattgataaccacgatcaaattgcataccttcaaccacttctagttcagtgtttagtccatttgattcttcaattgtaatgacaccatcgttacctactttttccatagcttcagaaatataacgtccaatttcttcatctgctgctgaaatcgcacctacttgcgcaatttcatttttattttcaactttttgagaattttcatgtaacgcttcaacagcaactttaactgccttgtcgataccttgtcgtaaaccaactgggttcgcaccacttgtaacatttttcaagccttcttgaatcattgcttgagctaatactgttgcagttgtcgtaccgtcaccagcaatttcatttgtcttatttgcgacttcttgaactagtttagcccccatattttcatatggatcttctaattcgatttctttagcaatcgttacaccatcgttcgtaattaaaggtgctgtaaactctttatctaatacaacattacgtcctttaggaccaatcgttactttaactgcatttgcaagttggtcaacaccacgtaacattgcttgacgcgcatcttcagagaatttcaattgtttaaccataaatgataaacctccatttgtttagttgtgtttcattttcgttctttttaatttatctatgaatttagttttgtattattcaataactgctaaaatatcttcttcatttaatactagatatgtttcattatctcgtttaacttctgtaccagcatattgttggaacacgacacggtccccttctttcacttcaggagtcactcttgtaccatcatttaatagacgtccagttcctactgcaacgataacgccttcgtttgatttttctttagcactatcagttaaaacaataccacttttagttgtttgttcttgttcttttttctcaataatcacacgatttccaattggttttagcatgattgttcctccttaaaaaaacctaaagtttagcacttaacattaaagagtgctaacatacatttataataatcaaatttggtcaaaatttcaagtcataaccttttaattaagttttgtaacttcaagttatttaagataaaataagttataaataaaatatgtggaggaaaattatgacaagactatgggcatcattgctaactgttattatatatttattgtcgcaatttttaccggcagtcattgtaaacacaacacaatttgcacaatatagtgattttgaacaacaaaaagccggcatctatattcaactcgttctatttttaattgcggctactacgattatttttattaattttaaaatcaaagaccctacaagattagaatctgaagtaaaggaacctaataaatacattattccatgggcattacttggatttgcacttgtcatggtttatcaatttatagtgagcattgtattaacacaaatatacggtggacaacaagtaagtccaaatacagaaaagctaatacttattgctcgaaaaatacctatatttatcttctttgtatctattatcggtcctttattagaagaatatgtattcagaaaagtaatctttggagaattatttaatgcgattaaagctaatcgtatcgtggcatttattattgctacaacagtaagttcattaatatttgcattagcacataatgatttcaaatttattccagtttattttggtatgggtgtcattttttcattagcatatgtttggacaaaacggcttgctgttccaattattatccatatgttacaaaacggatttgtcgttatattccaattacttaatcctgaggctttgaaaaaagccacggaacaagcgaattttatatatcacatttttattccataataaaaaaaacgaatcacacacggattatcgttgctgtgattcgtttttatttttctttttatttcgctttacaaataagaatagcatgattgaaaataccaccatcatagaacatacaattgctagccaacttttactatatgcagttgacgcacttttcttattatcttcttgttttttaactactgtaaaatcgtctttttcatgcggttcaaatgagcgttgttttgaatccggcttatcttcgggctttttcaaatctggcattgatccaatttcaccagtaattaatgcgagtacttgttcatctaaattacgatagtacctttctgatttcaatggattgaaatattggaatctaaagtaattcgattgctgttgtaatccatttaaatatgcatttccgctgaaattttgttttcgaataatattataaatgtcttcatcagtaacttctccataatctttgcccaacttattaatttgatttaaaatatacggattatacttgtaagccccatttgccaaggctaaaaatcgttgggatacaaaatcattaccagtaggattttgtgagtttccttgattcccatttggttgccattgaccttgattagatccatctgaagcatttgggttccatgttcccccatttttcgagccaccagaatgattggaatccccaggttgatcgggatctggtgacgggttaggatttggcttattagggtctgagtctggttttggattcggattcggatttggctttggtttatctggatctggttttggatccggatttggctttggtttatctgggtctggttttggatctggatttggtttcgggttatctggatctggttttggatccggatttggctttggtttatctgggtctggttttggatccggttttggtttcgggttatctggatctggttttggattcggacttgggttttggttatttgggtctggttttgaatctgtacttgggttttggttgtttgagtctggcttcacattattcgaatcaggattagcatcacgactattcgaacctgttccttcattacccgtttgatttgattcgtgaggtgtcccagtctcattattattcatttcactatttactgatggtgaagttatattatgattcaaattagtagttggtttttctccatttaagttatcctttgcttcaactgtgtgcgttgcaagccctaaactactactacttaaaattaaaatacttgttgaaagtaacattttcttaaaccaatgatatgacatttcacgagacacctccctttttcatgtaagtattaatctaagtataataaatatgcgttgaaaatgcatttatatttggaatttgaaaatgaatattaatattcttgaaattttcgtaaatattactttacaagtccgagtataaattttatacttagtctattaagtattctttactaaagaaggagcaataattatgggcttatttaaaaaagataaaaaagcaatgacttttgacaatgcaatggaagaaagacgttcaatatataatttgaaagattcgatatcaattagcgatgacgaattagaatcaatgattgcacatgcagttaaacatgttccttcatcatttaattctcaatcaactagaattgttctcttgttaaatgacaacaataataaattttgggataacacaaaagcaattttaaaagaagtcatgggagagaatcgtgatttcgagccaactgaacaaaaaattgataacttcaaacattcatacggtacaattttgttttatgaagatcaagatgttgtaagtggtttacaagaacaaatgccaaactactatgataattttgcaatatggtcaactcaaacaaatgccatgcatcaatttgcaatttggactgcattagctactaaaggcataggtgcttcattacaacactataatccacttgtcgatgagatgacttcaaatgaatttaatattcctaaaagttggaaacttattgctcaaatgccatttggtgatattcgtgaagctgctggcgaaaaacatttaatccagtggaagatcgtttcgtaataaaaaaataatcaatatattgttaagaatgggacagaaatgataaagaatcattagttattcattatgtagtagttcttacacattagcagctgctaatgtgcacttaagaataggaatacatgagtaaaactcatgtataagaaatactaatttctaaagaaaaagtatttctttatgttagagcccaccccaacttgcattgtctgtagaaattggtgttccaatttctctatgttggggccccatcaactactgtcaatataacattgtagagcctaggactttgattttatgtcctgggctcgttttttgcgtttcaacataacttttagtaagttatatataagatctatcaaggatgtgatgttatgaaagtccaaatttatcaattaccgattatttttggagatagttctaaaaatgaagctcaaataacgcaatggttcgaaaaaaatatgaatgctgaagtagatgtagtcgttttacctgaaatgtggaataatggctatgatttagagcatttaaatgaaaaagcagataataatctaggacaaagtttttcatttattaaacatttagctgaaaaatataaagtcgatatcgtagctgggtcagtttctaacattagaaactatcaaatatttaatacagcttttagtgtgaataaaagtggccagctgattaatgaatacgacaaagttcatttagttcctatgttaagagagcatgaatttttaaccgctggcgaaaacgtagctgaaccctttcaattgtctgacggtacttatgtgacccaacttatctgttatgatttacgttttccagaattattaagatatcctgctcgtagtggtgctaaaattgcattttatgtggcgcaatggcctatgtcacgtcttcaacattggcattcattactaaaggcacgtgcaattgaaaataatatgtttgtcattggaactaatagcactggattcgatggtaacacagaatatgctggtcattcgatagttataaacccaaatggagatttagttggagaattaaatgaatccgcagatattttgactgtagatttaaacttaaatgaagtagaacagcaacgcgaaaatatacctgtatttaaaagtattaaattagatttgtataaataagaagcgcccgaaataatatttaacacatgtcatgactaaacatagatttatgagagatttttcataagtctatgtttatttttttataatagataactcagtaagaatccatttcgccctttgcaaatgaatgattttcttaattaaattgattaattttttgaccttttccaacattagacttattcatatattttaacggtgggtctcataatgaggattaactctccccttctttattacaataaaaaaggccgcgagcttgggaggggctcacgaccatacttattattaagggaatgttttacagttattttttcaatctatttttggggatgttattaattatgaaaaaaattttatttatcaaataatgataaatcgatgttgtttacgatagcttacatgctagaaataattatctgtaatgataattaagaaaaatacatagcactgagtccaaggaaactaactctactagcaaatgttactcacttgctaattttacatggttattaagttgggatggcttaataactcatacttttagtactatacgaagataacaaatttacaatgaaagtaattaattattcatcttattttttagtgaatttgttcactgtgtcgataatccattttactaagtcaccgattgttgaaatgatatcttgtgccattgaaatcactccttccttaattaagataaaaattcttaaaattaaacaactcatcaactattttccatcacatctctgtgatctagttatattaaaacatgctaaaagcatttattttccaatttttcttaactagtcgttttttattcttaactgtaaatttttttatgttaaaatattaaatacaaattacatttaacagttaagtatttatttcctacagttaggcaatataatgataaaagattgtactaaatcgtataatgacagtgaggagagtggtgtaaaattgaattattttgataataaaattgaccagtttgccacgtatcttcaaaagagaaataacttagatcatattcaatttttgcaagtacgattagggatgcaggtcttagctaaaaatataggtaaattaattgttatgtatactattgcctatattttaaacatttttctgtttacgttaattacgaatttaacattttatttaataagaagacatgcacatggtgcacatgcaccttcttctttttggtgttatgtagaaagtattatactatttatacttttacctttagtaatagtaaattttcatattaactttttaattatgattattttaacagttatttctttaggtgtaatctcagtatatgctcctgcagcaactaaaaagaagcccattcctgtgcgacttattaaacgaaaaaaatattatgcgattattgttagtttaacccttttcattatcacacttatcatcaaagagccatttgcccaattcattcaattaggcatcataatagaagctattacattattacctattttctttattaaggaggacttaaaatgaatacattatttaacttattttttgattttattactgggattttaaaaaacattggtaacatcgcagcttatagtacttgtgacttcataatggatgaagttgaagtaccaaaagaattaacacaattacacgaataatttaaatagagagtgtgatagtaggtggaattattaaatagttataattttgttttattcgtattaactcaaatgatattaatgtttacaataccagctataattagtggtattaagtacagtaaacttgattattttttcattataggaatttcgacattatcgttatttctatttaaaatgtttgatagcgcgtccttaatcattttaacttcattcattattataatgtattttgtcaaaatcaaatggtattctattttgttgattatgacttcacagattattctgtactgtgctaactacatgtatattgttatatatgcatatatcaccaagatttctgatagtatatttgtaatattccctagcttttttgtagtttatgtgactattagtatactattctcatatataataaatagagttctcaaaaaaattagcacaccatatctaatactaaacaaaggatttttaatagttatttcgactatcttactgcttactttttcattgtttttcttttattctcaaataaactcggatgaagctaaagtaataaggcagtattcttttatttttattggtatcactatatttttaagtatattaacatttgttatttctcaatttctccttaaagagatgaaatataaacgtaatcaagaagaaattgaaacctattatgaatatacattgaagattgaagctatcaacaacgaaatgcgcaagttccgacatgattatgtcaatatcttaacgacactttcagaatacattcgcgaagatgacatgattggtctacgcgcttatttcaataaaaatattgtacctatgaaagataatttgcagatgaatgctattaaattaaatggtatcgagaatcttaaagtacgtgagataaaaggcttaattactgcgaaaattttacgtgcacaagaaatgaatattccaattagtatcgaaatacccgatgaagtaagtagcattaacttgaatatgatcgatttaagtcgcagtattggtattattcttgataatgcaattgaggcatcaactgaaattgatgaccctatcattcgcgttgcatttattgaaagtgaaaattcagtaacgtttattgttatgaataaatgcgctgatgatataccacgcattcatgaattgttccaagaaagtttttctactaaaggtgaaggtcgtggtttaggtctatcaactttaaaagaaattgctgataatgcagacaatgtcttattagatacaattatcgaaaatggtttctttattcaaaaagttgaaattattaacaactagccataaggatgtgaatgtatgaaaattttcatttgcgaagacgatccaaaacaaagagaaaacatggttaccattattaaaaattatataatgatagaagaaaagcctatggaaattgccctcgcaactgataatccttatgaggtgcttgagcaagctaaaaatatgaatgacataggctgttactttttagatattcaactttcaactgatattaatggtatcaaattaggcagtgaaattcgtaagcatgacccagttggtaacattattttcgttacgagtcacagcgaacttacctatttaacatttgtctacaaagttgcagcgatggattttatttttaaagatgatccagcagaattaagaactcgaattatagattgtttagaaactgcacatacacgcttacaattgttgtctaaagataatagcgttgaaacgattgaattaaaacgtggcagtaattcagtgtatgttcaatatgatgatattatgttttttgaatcatcaacaaaatctcacagactcattgcccatttagataaccgtcaaattgaattttatggtaatttaaaagaactgagtcaattagatgatcgtttctttagatgtcataatagctttgtcgtcaatcgccataatattgaatctatagattcgaaagagcgaattgtctattttaaaaataaagaacactgctatgcatcggtgagaaacgttaaaaaaatataataagataataaagtcagttaacggcgtattcaattgtaaatcttgttggattttaacaagataactagcaaatgcactgtatagctggctttttaattgtttaataacaaaattaaatatgacgcgtgaattaaaaaatgatgtaacgtttctttgtatacctattcctattactacataatttatcaatttctatttcactctacaatcctatggcgcaatttttaacaaaatatactaaatttgaaattgacagtttccataaataaaatgctacaatttcctaccccgtgaatcttattttgttttaaaaaacagtgtagcacaagattcaacttgtttcctacactgttttataaatgaattatttaaaatgcttgttcaacctcttgtaatgttggcaaactattaatagcaccatacttcgttgtcactattgcagcaacgcgattgctaaacgctaaaatttcctcaccttcattttcaaataactgagttaaatttaacacatcggttgctaaaatcctgctaataactgcaccaataaaagcatcccctgccccagttgtatcaacaggttttaccttatagccactatgataatgattaataccatttttcaaatatacggcagcaccatctgctcccttcgtataaatgactacagtaacattacctgtaaataatgattgaatggcttcattttcatcatgaatacctgtaataaattctaattcttcatctgaaacttttacaatatgcgccaatggcaaaaaggtatgaatagtttgtcttaaatcttcagcgttatcccataatggcaatcttacattaggatcaaatacgacagtaccatttgcatttaatgttttggtaatcaattgataatgtgtatctctcatcggactatcgaccaaatcaacagaacaaaaatgtactacatcattttcattcacatcaatatcattcacaaaacttggttcaaataacatatcagcagagggcttacgataaaaagaaaaatctcgctcgcccgcttcagtcaaactcacaaaagctaacgcagtgtttgcttcattcgtgcgatacacttttgatacatctacaccaatacttgatatcgtttcaataatgctatctccaaatgcatcattacctaattgtgtaatcatatacgcttgttgtcctaacttttgaactgtacaagctacattgcatggcgcgccaccaatttgcttcgtaaatgtttgaacatcttttaaattcgcatttgtaatatttggaataaaatcaattaacgcttctcctattgaaaatagacgtctcatttatgttcatcctttaaatcatatttagtaaattgtaaatatacttgccctgattctgttgatgttttaatacctagtgcgtcttctgtcgggaaaattcgagatgtcaaaacacgttccccatcattacagaaaatttctatactagatgtatcaacaaaaatttgtaattgctttaatggcgtgtctaatatcgtactacgcgtcgtaccttcaacatttgtcggcaataaaccactgtcgctgcgatctaatgttattttattttcacgcttgttataagcaattaatgttgaagaagtcttagatgtacgtaattcaaagtacacttcggtagcatcattatccaaaatatctatgattaattcatactgtttaccttcatacggatgtaattttcgagtaaatttatttgcgtagcctaatgctgtctctttattgtgacgtaatttttccaacgctggatatggacgttgcttaagttgaccattttctacatttaatacacgaggaattgttaagcaatgggcccatccttcattatcagtaggatattcgatttccggtaaccccatccatccaattagtactcgtcggcctttttcatctaaaaatgtttgaggtgcatagaaatcaaaaccattatcaagctcgacaaaattttcatgttcatatgttaacttttcaatatcaaactttccaagtatataaccactttgataaatatttttgaactgatcgccttttggttcaataccttgtggacaaataagtatgacatcttgattatctacattaaagtaatctgggcattcccacatatatccaaaatcatccaactctgtatttatttcacctaaataatgccaattaattatatcttcagtattataaagtaataatcgaccttgctgattattattttgtgcgccaatgatcgcataatatttctcatcatatttaaaaactttaggatctctaaaatgacttgtatatccttctggttgctggctaattactggctttggaaacttttcaactgaaccgtcttctttcagtcgtgcgatcatctgacttgcatgtcgttgccaatgattatctcgatgatttcctgtgtacatataatataaatgcccgttatattcaaaagcgctaccgctatatacaccatggctgtcatatctagtatctggatttaaaattggcccttcagctttaaagtttattaagtcatcactcgtgtagttataccaatactttaagccatgtactgcgcctaatgggaaccattgatgtgaaacataatacttccctttataaaaaataagtccgttggggtcatttaataagcctgtttctggttgtatatgaaattgttgacgaaattttgattgatcaacttgttgttttaatgttttaaaatactcagtatcaacgtcctcgattcgttgataacgttcttctctagtccattcggtcataatatttacccagtcctccttttataatttatgctgttaacaatttatattctattatagcaaattttacctacgttctttaacttttaacctatccatttatagttatatggtatcggttccacatttaatttaaaaaatacagcgtctaaatattaacatctactgtgacgctatatggcatatcttgctttttaagcatctgttgtatttcttccatcgcgcattggccagcttcaaaataattataatgaattgtttttatcgatggagacactaattgtgtcattgggtcaccaccaaaaccatatatttgatgtggtttcataacatcttttttatcagaataatatttataggcagctaatgcaatcgtatcagttgctccaacaaccgcatctacttgctccacattttccaaaacatttgcaacatctttttgtgcttccacataagtaaaatttgtttcatgtatattaggtttaatttggtatttagctaactggtcaagtaaaccacgttttctatgtataccaactgcaatatctttttcacttacgctaaacacttcaacttgttgatatccctgttgaccaatccattcgcctataatttgacctgctttataatcatcatgcacaatactatgaagttgttcatgttgttgaccaacaataacgattggtacattcattttattaatgacttcaatatgtctctctgttatatctgtagccattaaaacaataccatctactttactgcgtgctaatgtttcaagcgcttgtatttctgcttcgatatttaaacctgtataatttaaaattaattgtgattcatatttttggcattgttttgccaatcctttgattgtttcgtctactgcatatgaattcattctaggtataatggcaccaataaggtgtgtttgtctcgctcttaaactttgagcaaattgattcggttgatagtcatgttctgctataatttttgttaatttttcacttgtttttttactgacagatccattatttaaaaatctagatactgtactttttgaaacgcctgccaatttggcaatatcagatatatttttcatacttattcacctatcattatttgtgacacttagccatattttagcatatgtgtaaccgctttaaataatatttctgcttctttcataaaaagatttcaaaataaaacttttgtataacaaaatgtcccaacatcaacctttagttaaatgtcaggacaatgaatattctatgtatatatattctaatatcgaatatgtttattgaatctatttagctcaccttcaaagtaagcatgttcaccgtgaacaatcttgtctaatcctatattcgtttcttgttccgtaactgataatggtgtaattaatttaattactttcgcaataataaacgtcatgacgatactaaaaattacaactgctgttacacataatatttgtacaagtacaatatgtatgtcaccagtataaataaagccattctcaatatcaggatttgcctttttactttggaaaactgctgttaaaacagcaccaataataccaccaacaccatgaataccaaatgcatctaatgcatcatgatattttagttttaccttgatgtaattaataacgatatagcaacagataccaccgatcattgccatgattgttgcactaagatatgtcacgtatcctgctgcaggtgtaatgacaactaaaccagctaatgcacctagtaaaagtccaagtaaacttgtcgtctttttaaaaatatattctaaaattaaccaacctatagcacctgcactggctgaaatgacagtatttgtaaatgcaagcatcgcaatattatcaaatgtaaaagcactacctacattaaatccataccaaccaatccacacgaatataccgccaatcaacgtaatgataagattatgtggtgttgattcagaatgtttgtttccttttccaatcataatagctaatactaaaccagaaacacctgatgtaatatgaacaaccgtacctccagcgaaatctaatacaccgagtttgttaatccaaccgccgccccaaacccaatgtgctactggactgtatacaagagcagtccatattactacgaataataaataaggaataaacttcattttctcagcgattgaaccagataaaatagaaattgcaatcgtacaaaacatcatttgaaataacataaacaaagcgaaaggaatatgtgggctaatatcttcttgagtcgcaaaacctacatgattaagaaaagtatattcccaatttccgaaccataaattcccattcccaaaactaattgtaaaaccaactgttatccatacaaatgtaacaagcacaattgctgccatactttgcatgacagtattaagcgcatttttagattgaactaacccaccataaaataaacttaatcctggtgtcattaaccaaactaataatgtacacaaaaacataaatatcgtatcgttaagattcatacttaccactccctttttttcataataatctgacaatttataaaaagcaaaaatgcgttaagttttattacatcttttggaataaaatgtgccacactatataaaaatgatttcatgaactaaaacaaaaaagactacttactcacttttaaattagcggaagtagccatagaatctaatatctattttattgttaaaatgataacgttaaactttttgaattgtaattgtccatgaagcattatcaatttgttcatagtttgttacaggatatccattttctgctgcccaatttggaatagcttccgtcgcttgcgtgcaatcaaaatcaatttttaattcatctccagattgcaatgttgccattttcttttgcgcttcaattaacggaaatggacataccattcctactgtacctaattcgtgtatcataattatttctccttttccaatcacttttatttgatcaacatcatttgcataataatcttctatactatttgcgtttgctgtttaaccttttcagattgttgttgtacttttttcattggacgaacaaagataaaatgactcattgtccatacaccaactatcatcgatgctagcgcaatccatccttgccaagtcatcgttgccgtttcaaccaaaccgttaccgatagaacaaccaccagcaactgacgcaccaaatcccatacatatgccaccaatggcactgtttcgtattgtaatcttgtctggcaatcgccatttaaattctcttgatcctctagctgcaatatatgaaccaatgaaaattcctagaactaaaaagacaccccaatcaataaatttagtttcacctgtaatcaaaaagtgtactaaatttgctgaaggcgttgttatacctaaaccgtcatttcttccagttgatgcactcattggccaagctaagagtgcgataagtccaattacaattgctgcaataaatggatggtatcgtttttcgaaaaggtaatatctaatacctgtataacgttgctttagttttggaacagcaactcgaactttcttattattgagtgttcttacaactagaaaaatggtgattatagttaatataacgactaatccccaaaacggaatgccagttgtttgagacatatcactatttacattcgttggttgattaattttatccattactggctttaaaatccctgttttagtgattgctgcagtaacagcatataatactaatgcaatccaactaccaattagcccttcaccagcgcgataccaagtacctgttgcacaccctccagccaatactattccaattccaaaaataaaagaacctataattgttcccaatattggaaaactatgtgcaggaatttgtaaaatatctgttgccgtcaaaatcaataatcctatactttgaatagtaatagcgattaataatgcatagaacatcttattattcttttgcacatacatatctcgaaagccacctgttaaacaaaatcttgttctttgcattacaaaacctaagagtcccccgacaattaagccactaaaaatcatccacataatcctaacctctcatttccgataagtttagtatgtattataggtgatgattttcttgttttcaaccttatacacaatatttttgatatttatattatattcatataaggaaggcgattaattacgattcattattatatctctacgtgttaatttattaacctatactatatttatcaacacaacagtttttcctttcattttcaaacataacagaaaaagcctgagacatacttagtcccagactgttctataattaattaaagatataacaaggttaatcattcaaagctaacatcacatttattcactgtaatttttcataaagaataataatgactgtaattctatacctaagtcaatttgatgtacttgcacatctgaaggcgtattaattctaccaggagtgaagtttaaaatacctttcacaccagcttggacgagttcatctgcaactttctgtgcaactctttctggtgtagttagaatcacaacatctatttcttccttcttcaatgttgttattaattcatcgttatcttttacaataacgttccctattttctggccaataacatcttcttttacgtcaaacgcttctgtaatcgtcatatcgtcatgtattgaaaagttatatgtgagtaaagctttccctaggttcccaactccgacaattgcgattttgatcatgtcactctcgcttagttcagatttaaagaaatccaataaactatctatattatatccgtacccttttttacctaattcgccaaaatatgaaaagtcacgacgaattgttgccgagtcaatttgtaacgcatcgctaatcgcttttgaatttacacgatctatacctttagattttaatgaactgacaaatctataatataacggcaaacgttttaaagttgctcgaggaattttaacttggtcactcattcgctatttcctccttcgtgtttgaatgaattatatctatgtattcaaacgagttagagcgtaattgttagattattaaaaaacaaataattgattacaatgaatacctaaatattatacattattgaattttaaaaataaatatcttagtttcaagacggcgttttatactgtaaaatggttattaatgtaataattacgacttttttcataagttaataaaatttgagaaagacgaaaggtgaagatcgaatgatacttttacaactcaatcatatatcaaaatcgttcgatggtgaagatatatttactgatgttgattttgaagtaaaaactggtgaacgaattggtatcgtaggaagaaatggcgccggtaaatcaacattgatgaaaattatagctggcgtagaaaactatgattctggaaatgtgtcaaaaattaaaaacttaaaactaggttatttaactcaacaaatgactttaaattctaatgcaacagtttttgaagaaatgtcaaaaccatttgaacatattaaacgaatggaaagcttaatcaaagaagaaacagattggttatcaaaacatgcaaatgattacgatagtgatacatataaaacacatatgtcccgttatgaatctttatcgaatcaatttgaacaattagaaggatatcaatatgaaagtaaaattaaaacagtactttacgggttaaattttagtgaagaagatttcaataaacctatcaatgattttagcggtggccaaaaaacacgtttatctttagctcaaatgctattaaacgaacctgatttattacttttagatgaacctactaaccacttagatttagaaacgacaaagtggcttgaagattatctacgttattttaaaggtgcaatcgtcatcatcagccatgatcgttactttttagataaaatagttactcaaatttatgatgtggctttaggtgatgtcaaacgctatgttggtaattacgaggaatttatacagcaacgggatttatattatcaaaaacgaatgcaagaatatgaaagtcaacaagcagaaataaaacgattagaaacttttgttgagaaaaatattacccgtgcttcaacaagtggaatggcaaaaagtagacgtaagattttagaaaaaatggaacgcattgataaaccaatgttagatgccaaaagtgcaaatattaaatttggctttgaccggaatacaggtaatgacgtcatgcatgtaaaaaatttagaaatcggttatcaaactgcaattaccaaacctatcagtatagaggtctctaaaggcgatcatatagcaatcattgggccaaatggtattggaaaatcgaccttaattaaaactattgctaatcaacaaaaagcgcttaatggcgatattactttcggcgcaaatttacaaattggttattatgatcaaaaacaagcagaatttaaatctagtaaaacgattttagattatgtgtgggatcaatatccgttaatgaatgaaaaagatattcgagcagttcttggacgtttcttatttgtacaagacgatgttaaaaagataattaatgatttatctggtggtgaaaaagcacgtttacaactagcactacttatgttgcaacgtgacaatgtacttattttagatgaacctaccaaccacctcgatatagattcaaaagaaatgttagagcaagcactccaacattttgaaggaacaatactatttgtttcccatgatcgttactttattaaccaattagcaaacaaggtatttgatttaacaattgatggcggaaagatgtatttaggagattatcaatattacattgaaaaagttgaggaagcggaagcgttgaaagcgcaccaagaagaacagtcagttaacgtacaagcacataaaaagtctatggaacaatcgtcgtatcataaccaaaaagaacaaagacgtgaacaacgcaaacttgaacgacaaatatccgagtgtgaaaatgaaatagaaactttagagactactatcttacaaatagacgagcaattaacccaaccagaagtgtataacaatccacaaaaagcaaacgaattagctatccaaaaacaagatagcgaacaaaaattagaacacgctatgtctaaatgggaagaattacaacaaaaactataaaaatatacataactctaactgtaaaatcgctatagttagagttatttttttacaaattttaatttttttattcacaataaaaacgctgatattaaagctatccacagacttatcctagttatccacaagtaaattaacactaatcaattatttattttctgttttcccacctgatatccacaataaatgacgttatcaacaccttttatccacaagttattcaccctttgttgataagtacgcatgttctctattgacattgtttttatcaaaattcattgttaagacactttctttatgaaataataatattattgaagtatatttttattattattaaaaataaataaggggatacttatgagcacaaatcaaacatttttaatatttgttatagcaattattctacttacatctgtaataggaattgttggacgatacatgagtcgtcaacgtctattaaaatctatggaaacattatggcaaacgatttctccattagaagcttttatcagaccgaactcacatttcgactatgagtataagctctacaaggaaaaatttgaatcacattcattagttgatgataaaacttggtccgacttaaatatgaatgcaatctttcataagatgaattataatttaacagctattggtgaaatgaagctatatgcctgtttacgtggaatgctttcaattacgaacaaatcattacttagtttatttaatgataatgctgaatttagaaaaaacgtaacatatcatttagctttgattggtaaaactgtttatccaacatttccagaccaaatcacaccagtaaaacgtcataatatattgtttctatgcccgtttttaccagttatctcatttgcagttatatttattaattcacaagttggtattttattatttcttatgagttgcctatttaatatcattttatcagcaactttaaagcgtacatatgaggatgacttaaaatctatcttttatgcatccaatgttttaaaacaaggctatactatctcaaaaattaaacatgctccacaacctgaagtcaattttaagcaatttagaacagcacgtcatttaacgagtgttttagctgaagttaatgatgaagatatcggagctatggtaattaaactagttaaacttattttcatgcttgattatgttttatttcattcaattcaaaaaagctatacaacacatatgaatgagcttaaaaattgtttcgattacatagctgaattagataatcattatgcattagcaatgtatcgtagaacgctagaatgttatactgaaccacaaattgatgattcaaatgatggcatagtattctctgagttaacacatccactcatagcagatgcagtagccaatgatttctcactatcacaaaatatactgttaactgggtctaatgcttcgggtaaatcaacatttatgaaatccatagcaataaacattattcttgcatcggctatacaaacagttaccgcaagcaaatttgtatatcaacctggaattgtgttcacgtcaatggcaaatgccgatgatgtgttatcaggcgatagttattttatggctgaattaaaatctattaagcgtattgttgaaattccagataatcaaaaaatatactgctttatagatgaaatttttaaaggtaccaacacaactgaacgaattgccgcttcagaatcagtactatcatttttacatgaaaaatctaactttagagttattgcagcaacacatgatattgagttagctgaactcttaaaacaacgttatgaaaattatcatttcaatgaggtaatagaaaataataacatacattttgattacaaaattaagcctggcaaagcaaatactcgtaatgccatcgaattattaaaaatcacttcatttccagcaaaaatatatgaacgagcaaaagataatgtcccgaaaatttagcatttaactttaaatataaaaacgtcagctatcacatgacagaagactatgaacagtttcaataatgttcatcgtaatcatgttaataactgacgtttattttattctgcagaatactcttctaaatctatattgctgtgcccatttaatgctaaatcagcaaatcgaccttgctgatacaaatagtggccggcaacgcctatcattgcagcattatctgtgcataatttaggacttgggatagttaattgaatgtcattgactttgcattgatccgctaaagattgacgtaatcctttattactcgccacgccaccagcaagaattaatcgctgaacactatattctttacaagcttgaatagctttaaacgtaagcacctctacaacactattttgaaagctcgttgctacgttagcttcaatgattggaatatttttttgtcgttgattgtgaagttgattgatcacggcacttttcaacccactaaaactaaaatcataactatctttatccaaccaaacacgagggaatgaataagtatcttcaccttcagcagtcaaccgatcaacttgtggaccacctggataatttaaaccaattgttcgtgccactttatcataagcctcacctactgcgtcatctcgtgtttcaccaatgacttcaaatgataaatgatctttcatataaactaattcagtatgtccacctgaaacaataagtgcaattagcgggaatgttaatggctcttctatgtgattagcatatatatgtcctgcaatatgatgaacaggaataagtggcttatcgtaagcaaatgccaatgctttggctgcattaacacctattagtaacgcaccaattagtccagggccttctgtaaccgctatggcatcaatatcttccattgatacatcggcatccactagagcctcgtttattgttgttgttataccttcaacgtgatgtctacttgccacttcgggaacgacaccgccaaatcgtttatgactttcaatctgacttaaaactgtatttgataaaatctctctctcattttttataacactaacgcttgtttcatcacaacttgtttcaacagctagtattaatatatctttagtcatttaaattcacccacataaccattgcgtcctcaccttcaccataatagtttttacgtttaccaccatattgaaatcctaaattttcatatacatgttgtgccactttattattaactcttacttctaaactcatcacatcacaagtgtgacttgcatagtttattccgtattttaaaagcatttgacctaaaccatagcctctataattatcatcgattgcaactgttgtaatttgagcttgatcgataacaatccataaacctaaataaccaataatttgttgttcaaattctaagacaaaatatttcgcaaagttattttgctctatttcatgataaaatgcgtcaattgtccaagaactgtcattgaaactccgacgctcaatatcaaagacttgtggcacatcttctttagtcatctctctaatgtttaattgttcttttgactgttgatccaatttcgttccgcctcagctaatttatggtatttaggagtaaatgtatgtacgtctgaaggtttatctatcaattgatacatgactgatgcatttggtagctgcgcaatcacttcaccttgtaattcatcttgtaattttatagtatctttcccaatataaataaatggttggtttaaatcttctaaaaaagctcgcaatgcctctatcgacatatattgatcttctaaaatagtcactaattgaccattttgccactggaatatgcctgtataaactgcttgtcgtcttgcatcaaacacaggaaccaataatttatcagtatggtcgattgttgctgccaatgcctttaatgatgaaacaccatataatttaacatctaacgcatacgctaatgttttagcaacagtaacaccgatacgtaagccagtatatgaaccaggaccttcagcaacaataatcgcatctaattgctgtttagctattttgcactgctcaaatagctgactaatcgcaggcattaattgcactgaatgattttgtttagaatccgtagttatttcagctaaaacttcatcgttttgcatcaatgctactgataatggttgattcgatgtatcaatgagcagcgaattcatgaataattgcctccttaatttgttcaaaatgttctccttgcgcgaacaactcaatttgtcttgtattttcagatattgttgaaatattaatagataaatgcgtcgctggaagtaaatcttttataaattgactccattcaataacagtaattgcctgatcttcgaaaaattcatcaaaccctaaatcttcatcagaatcttctaagcgataacaatccatatgatgcaattttaaatttttacccctatatgatttaatgatgttaaatgtcggggaattaatcgtacgtcttacaccaagagcttttcctataaattgcgttaacgttgttttacctgctcctaaatctccgttaagtaaaatcaaatcaccacttttcaattgctcaactaaaaatatagcaaattgattcatttcatctaaattatttatctttatcaatgttgattctcctatattatgcttttcattcataaaaatgattatccattgttcaatcgtatctaactttatatttaacctttatattgtaacaaatttcaacttaaatttcttatctttgaaacagattatctattcaaagttaattgtaagaaaatttaaaatatttgttgacatactaaagcagatatagtaaattaaatttatcaaatttttagacaattctaactattaaagtgatatataccattcacggaaggagtataataaaatgcttaatcaatatactgaacatcaaccgacaacttcaaatattattattttattatactctttaggactcgaacgttagtaaatatttactaaacgctttaagtcctatttctgtttgaatgggacttgtaaacgtcccaataatattgggacgtttttttatgttttatctttcaattacttatttttattactataaaacatgattaatcattaaaatttacgggggaatttactatgcgaagcgacatgatcaaaaaaggagatcaccaagcaccagcaagaagtcttttacatgccacgggcgcgctaaaaagtccaactgatatgaacaaaccatttgtagctatttgtaactcttatattgatattgttcctggacatgttcacttgagagagcttgcagatatagctaaagaagcaattagagaagccggtgccattccatttgaattcaatacaattggtgttgatgatggaatagctatgggacatatcggaatgcgatattctctaccatcacgtgaaattattgcagatgcagctgaaactgtaattaacgctcattggtttgacggcgtattttacattcctaattgtgacaagattacacccggtatgattttagcagccatgaggacaaacgtaccagctatcttttgctctggtggaccaatgaaagctggcttatctgcacatggaaaagcattaacactttcatcaatgtttgaagcagtcggcgcatttaaagaaggatcgatttctaaagaagaatttttagatatggaacaaaatgcctgccctacttgtggttcatgtgctgggatgtttactgcaaattcaatgaactgtttgatggaagttttaggtctagcattaccatacaacggtactgcacttgcagtcagtgatcagcgacgcgaaatgattcgccaagcagcttttaaattagttgaaaatattaaaaatgatttaaaaccacgtgatatcgttactcgcgaagcaattgatgatgcatttgcacttgatatggctatgggtggttcaacaaacacggtactgcatacgttagccattgccaatgaagctggtattgattatgacttagagcgcattaatgctattgccaaacgcacgccatatttatcaaaaatagcacctagttcatcgtattcaatgcatgatgtgcatgaagctggtggcgtcccagcaattattaatgaattgatgaagaaagatggcacgttacacccagatagaatcacagttactggcaaaacgttacgtgaaaataacgaaggcaaagaaattaagaactttgatgtcattcaccctcttgatgcaccatatgatgcacaaggcggtttatctatcttatttggtaatatcgcccctaaaggcgcagttattaaagttggcggcgttgatccatctatcaaaacatttactgggaaagcaatttgtttcaattcgcatgatgaagctgttgaagcaatagacaatcgtaccgttcgtgcaggccacgtcgttgtcattagatatgaaggacctaaaggtggaccaggtatgcctgaaatgttagcacctacttcctctattgttggtcgcggcttaggtaaagatgttgcattaattactgatgggcgtttttccggtgccacaagaggtattgcagttggtcatatttcccctgaagctgcatctggtggaccaattgccttaattgaagatggagatgagattactattgatttaacaaatcgtacattaaacgtaaaccagcctgaagatgttctagcgcgtcgccgagaatctttaacaccatttaaagcgaaagtaaaaacaggttatctagctcgttatactgccctagtaactagcgcaaatacaggtggcgtcatgcaagtccctgagaatttaatttaatttatttttatattggagatggttaaaatgtctaaaactcaacatgaagtaaaccaaaatattgaccctttaaaaatggctgaatcacttgaacttgaacaactaaatgaaaaaactttaaatgacatgcgttcaggatcagaagtgctagtagaagctctacttaaagaaaatgtggattatttattcggttatcctggtggtgccgtactacctttatacgacacattttatgatggtaaaatcaaacatattttagcaagacacgaacaaggtgctgttcatgctgcagaaggttatgcacgtgtatctggtaaaactggcgtcgttgtagttacaagcggtccaggtgcaacaaatgtaatgacaggtattacggattcacattgcgactctttacctctagttgtattcaccggacaagttgctacaccaggcattggtaaagatgcattccaagaagcggatattctatctatgacttcaccaattacaaaacaaaattatcaagtgaaacgtgttgaagatatccctaaaatcgtacacgaagctttccatgtagctaattctggacgcaaaggtcctgtagtgattgattttccaaaagatatgggtgttttagctacaaatgtggatttatgcgacgaaatcaatattccaggttatgaagttgttacagaaccagaaaataaagacattgacactttcatctcacttttaaaagaagcgaaaaagcctgtcgtattagccggcgcaggtattaatcaatcaaaatcaaatcaattattaacacagtttgttaataaacatcaaatcccaacagttactactttactaggtctaggtgctgtaccttatgaggatacactatttttaggtatgggaggtatgcatggttcttatgctagtaacatggcattaactgagtgtgatttactcattaatttaggtagccgcttcgatgatagattagcaagcaaacctgatgcctttgcacctaacgccaaaattgtacatgtagatattgatccttcagaaatcaataaagttattcatgtagatttaggtattattgcagactgtaaaagatttttagaatgtttaaatgataaaaatgttgagactatagaacacagtgactgggttaaacattgtcaaaataataagcagaaacacccatttaaacttggtgaagaagatcaagtattttgtaagccacaacaaacaatcgaatatatcggcaaaattacaaatggtgaagcaattgttactacagacgtgggacaacatcaaatgtgggcagctcaattttatccatttaaaaatcacggacaatgggttacaagcggtggtttaggaacaatgggattcggtattccttcgtcaattggtgccaaattagctaatcctgataaaacagtcgtatgtttcgtcggtgacggtggtttccaaatgacaaaccaagaaatggcacttttacccgaatatggtttagatgtcaaaatcgtactaatcaataatggaacattaggtatggttaaacaatggcaagataagttctttaatcaacgcttctcacactcagtatttaatggtcaacctgattttatgaaaatggcagaagcatatggcgtcaaaggtttcttaatcgataagccagaacaactggaagaacaattagatgcagcgtttgcttatcaaggaccagctttaattgaggttcgtatttcccctactgaagctgtaaccccaatggttccgagtggcaaatcaaatcatgaaatggagggcttataatgacaagaattcttaaattacaagttgcggatcaagtcagcacgctaaatcgaattacaagtgcttttgttcgcctacaatataatatcgatacattacatgttacacattctgaacaacctgggatttctaacatggaaattcaagtcgatattcaagatgatacatcacttcatatattaattaaaaaattaaaacaacaaattaatgttttaacggttgaatgctacgaccttgttgataacgaagcttaattttaagacaaaggcaatgatgcgctaattagttatagatatatcataggctgctagttaacatctgccactattacaaagttatatttcagaattttcgaaaaacaaaacatttaattatttggaggaatttattatgacaacagtttattatgatcaagacgtaaaaacggacgctttacaaggcaaaaaaattgcagtagtaggttatggatcacaaggccacgcgcatgcacaaaacttaaaagacaatggatatgatgtagtcatcggtattcgcccaggtcgttcttttgacaaggctaaagaagatggatttgatgtgttccctgttgcagaagcagttaagcaagctgatgtaattatggtgctattacctgatgaaattcaaggtgatgtatacaaaaacgaaattgaaccaaatttagaaaaacataatgtgcttgcatttgctcatggctttaacattcattttggtgttattcaaccaccagctgatgttgatgtatttttagtagctcctaaaggaccgggtcatttagttagacgtacatttgttgaaggttctgctgtaccatcactatttggtattcaacaagacgcttcaggtcaagcacgtaatattgctttaagttatgcaaaaggtattggtgcaactcgtgcaggtgttattgaaacaacatttaaagaagaaactgagacagatttatttggtgaacaagcagtactttgcggtggtgtatcgaaattaattcaaagtggctttgaaacattagtagaagcgggttatcaaccagaattagcttattttgaagtattacatgaaatgaaattaatcgttgatttgatgtatgaaggcggtatggaaaatgtacgttactcaatttcaaatactgctgaatttggtgactatgtttcaggaccacgtgttatcacaccagatgttaaagaaaatatgaaagctgtattaactgatatccaaaatggtaacttcagtaatcgctttatcgaagacaataaaaatggattcaaagaattttataaattacgcgaagaacaacatggtcatcaaattgaaaaagttggtcgtgaattacgcgaaatgatgccttttattaaatctaaaagcattgaaaaataagatagacctacaatgaggagttgttaaatatgagtagtcatattcaaatttttgatacgacactaagagacggtgaacaaacaccaggagtgaattttacttttgatgaacgcttgcgtattgcattgcaattagaaaaatggggtgtagatgttattgaagctggatttcctgcttcaagtacaggtagctttaaatctgttcaagcaattgcacaaacattaacaacaacggctgtatgtggtttagctagatgtaaaaaatctgacatcgatgctgtatatgaagcaacaaaagatgcagcgaagccggtcgtgcatgtttttatagcaacatcacctattcatcttgaacataaacttaaaatgtctcaagaagacgttttagcatctattaaagaacatgtcacatacgcgaaacaattatttgacgttgttcaattttcacctgaagatgcaacgcgtactgaattaccattcttagtgaaatgtgtacaaactgccgttgacgctggagctacagttattaatattcctgatacagtcggctacagttaccatgatgaatatgcacatattttcaaaaccttaacagaatctgtaacatcttcaaatgaaattatttatagtgctcattgccatgacgatttaggaatggctgtttcaaatagtttagctgcaattgaaggcggtgcgagacgaattgaaggcactgtaaatggtattggtgaacgagcaggtaatgcagcacttgaagaagtcgcgcttgcactatacgttcgaaatgatcattatggtgctcaaactgcccttaatctcgaagaaactaaaaaaacatcggatttaatttcaagatatgcaggtattcgagtgcctagaaataaagcaattgttggccaaaatgcatttagccatgaatcaggtattcaccaagatggcgtattaaaacatcgtgaaacatatgaaattatgacacctcaacttgttggtgtaagcacgactgaacttccattaggaaaattatctggtaaacacgccttctcagagaagttaaaagcattaggttatgacattgataaagaagcgcaaatagatttatttaaacaattcaagaccattgcggacaaaaagaaatctgtttcagatagagatattcatgcgattattcaaggttctgagcatgagcatcaagcactttataaattggaaacactacaactacaatatgtctctagcggccttcaaagtgctgttgttgttgttaaagataaagagggtcatatttaccaggattcaagtattggtactggttcaatcgtagcaatttacaatgcagttgatcgtattttccagaaagaaacagaattaattgattatcgtattaattctgtcactgaaggtactgatgcccaagcagaagtacatgtaaatttattgattgaaggtaagactgtcaatggctttggtattgatcatgatattttacaagcctcttgtaaagcatacgtagaagcacatgctaaatttgcagctgaaaatgttgagaaggtaggtaattaattatgacttataacattgttgccctacctggtgatggaatcggtccagaaattttgaacggatctctatcattgcttgaaattataagtaataaatataactttaattatcaaatagagcaccacgaatttggtggtgcctctattgatacattcggcgagcctttaactgagaaaaccttaaatgcgtgtaaaagagcagatgctattttactgggtgcaatcggtggacctaaatggacagatcctaacaatcgaccagaacaaggattattaaaattgcgtaaatccttaaatttatttgcaaatatacgccccactaccgttgtcaaaggcgctagttctttatcacctttaaaggaagaacgcgttgaaggcacagatttagttattgtccgtgaattgacaagtggtatttattttggagaacctagacattttaataatcacgaggccttagattctcttacttatacaagagaagaaatagaacgcattgttcacgtagcatttaaattggccgcttcaagacgaggaaaactaacatcagttgataaagaaaatgtattagcttctagtaaattgtggcgcaaagtcgtaaatgaagtaagtcaattatatccagaagtaacagtaaatcacttacttgttgatgcttgtagtatgcatttaatcacaaatccaaaacaatttgacgtcatcgtatgtgaaaacttatttggcgatattttaagtgatgaagcttcagtgattcctggttcacttggtttatcaccttctgctagttttagtaacgatggtccaagattgtatgagcctattcatggatcagcaccagatattgcaggtaaaaacgttgccaatccatttggaatgattctatctttagcgatgtgtttacgtgaaagcttaaatcaaccagatgctgcagatgaattagaacaacatatttataacatgattgaacatgggcaaacgacagcagatttaggcggcaaattgaatactactgatattttcgaaattctatctcaaaaattgaatcactaagggggagatgtaaatgggtcaaacattatttgacaaggtgtggaacagacatgtgttattcgggaaattgggcgaaccgcaactattatacattgatttacaccttatacatgaagttacttctcctcaagcatttgaaggacttaggcttcaaaacagaaaattaagacgcccagatttaacatttgcaacactcgatcacaatgttcctactattgatatattcaatattaaagatgaaattgcaaacaaacaaatcacaacattacaaaaaaacgccatagattttggggtgcatatttttgatatgggttctgatgaacaaggtattgttcacatggtaggacctgagacaggacttacacagcccggcaaaacaatcgtttgtggtgactctcacacagcaacacatggagcatttggtgctattgcatttggaattggaacaagtgaagttgaacatgttttcgcaactcaaacgctatggcaaacaaaacccaaaaacttaaaaatcgatattaatggtaccttaccaacaggcgtctatgctaaggacattattctgcatttaattaaaacgtatggtgttgattttggtacaggctatgctttggaatttactggcgaaacaattaaaaacctttcaatggacggtcgaatgactatttgtaacatggctatcgaaggtggtgccaaatacggcataatccaacctgatgatataacatttgaatatgttaaagggagaccatttgccgataacttcgctaaatcagttgataagtggcgtgagctatattctgatgacgacgcgatatttgatcgtgtaattgaacttgatgtttcaacattagaaccacaagtgacatggggaactaatcctgaaatgggtgttaatttcagtgaaccattccctgaaatcaatgatatcaacgatcaacgtgcgtatgattatatggggttagaaccaggtcaaaaagctgaagacatcgacttagggtatgtttttctcggttcatgtacaaatgctagactatcagatttgattgaagctagtcatattgttaaaggaaataaagttcatccaaatattacagctattgtcgtaccaggttctcgtacagtaaaaaaagaagcagaaaaattaggtctagatactatctttaaaaatgcaggatttgaatggcgtgaaccaggatgttcaatgtgtttaggcatgaatcctgaccaagtacctgagggcgtacattgtgcatctacaagtaatcgaaactttgaaggacgacaaggcaaaggtgcaagaacacatttagtatcccctgctatggcagcagcagcagctattcatggtaaatttgtggacgtaagaaaggtggttgtttaaatggcagcaatcaaacctattacaacatataaaggtaaaatagtccctctcttcaacgacaatatcgatacagaccaaatcattcctaaggtacacttaaagcgtatttcaaaaagtggctttggtccatttgcttttgatgaatggcggtacttacctgatggttcagataatccagatttcaatcctaacaaaccacaatataaaggggcttctattttaattacaggagataattttggatgcggttcaagtcgtgaacatgctgcttgggctcttaaggactatggttttcatattattattgcaggaagtttcagtgacatattttatatgaattgcactaaaaatgcaatgttgcctatcgttttagaaaaaagtgcccgtgaacatcttgcacaatatgaggaaattgaaatagatttaccaaatcaaactgtgtcatcaccagacaagcgtttccattttgaaattgatgaaacttggaagaataaattagtaaatggattagatgacattgcaatcaccctacaatatgaatcattaatagaaaaatatgaaaaatcactttaagggagttgaatattatgacagtcaaaacaacagtttctacgaaagatatcgatgaagcatttttaagacttaaagatattgtcaaagaaacacctttacaattagaccattacttatctcaaaagtatgattgtaaagtttatttaaaacgagaagatttacaatgggtacgttcttttaaattaagaggtgcttacaacgctatttctgttttatcagatgaagctaaaagtaaaggtattacatgtgcgagtgcaggtaatcatgctcaaggtgttgcctatacagctaaaaaacttaatttaaacgctgttatctttatgccagtcactacacctttacaaaaggtaaatcaagtaaagttctttggaagtagtaacgttgaagttgtactcactggtgatacatttgatcactgtttagctgaagctttaacttatacaagtgaacatcaaatgaactttatagatccattcaataatgttcatacaatttctggacaaggtacgcttgctaaagaaatgctagaacaatcaaagactgacaatgttaactttgattatttatttgccgctattggtggtggtggattaatttcaggtattagtacttactttaaaacctattcacctactacgaaaattataggtgttgaaccttcaggtgcaagtagtatgtatgaatctgttgtcgtaaataatcaggtagtcacattgcctaatatcgataaatttgtggacggtgcatctgtagctagagttggcgatattacatttgaaattgcaaaagaaaatgtagatgattacgttcaagtagatgaaggtgcagtttgttctacgattttagacatgtattcaaaacaagcaattgtagcagaacctgctggcgcattaagtgtgagtgctcttgaaaactacaaagaccacattaagggtaaaactgttgtttgtgtcattagtggtggtaataatgatattaatcgtatgaaggaaattgaagaacgttctttattatatgaagaaatgaaacattattttattttaaacttccctcaacgccctggtgcattaagagaatttgtaaatgatgttttaggcccacaagacgatattacaaaatttgaatacttaaaaaaatcttctcaaaatacaggtactgtcattattggtattcaacttaaagatcatgatgatttaatacaactcaaacaacgtgtaaatcatttcgatccttccaatatttatattaatgaaaataagatgttatattcattgttaatttaacacatagtaagaaaaacagtcataaattgatttctaattgaaatcatcttatgactgctttttattatactttacattattgaggttgcacgctttgtataccatcgtatatttctttgagcctaaagtcttcttcattccccaccccattatttatattttgaatggcagttgaaattactttgtcataaatagccttctcactttctggtaaattatgtcgtggtatactcatcaaagcatatgctttttgtttatcttcaatgttttctatacggttcttcttattattaaaattctcattagcttcactaccattattattaatattatgcgtgttttctttttcatgtttgttttcttgcatatgattcgggacttctgacttatttttagcatctgcaggaaaatatattttatatgcaaaaaatccacacactatcaatgagcatacaaataaaaaagttaacatcgtaccaataaatattttcaaatccgttctcctttcaaccattcattcttacatgtatatttagtatttaaaaatccttatagtctcgatttgcctggcaacgttctactctagcggaacgtaagttggctaccatcgtcgctaaagacctttcttgacttgtgacaatcgcttgcttctttcctctccttcggctctcgcttactcatttagctctactaaactcgttgcgctcttttctcgtttcgtcagattcaaacgttttcacttcgccaagccatctttctttgtgtttgctttttactatgtaacttcagacataaaaaaagagaccttacggtctcaacttgcctggcaacgttctactctagcggaacgtaagttcgactaccatcgacgctaaggagcttaacttctgtgttcggcatgggaacaggtgtgacctccttgctatagtcaccagacatatgaatgtaatttatacattcaaaactagatagtaagtaaaagtgattttgcttcgcaaaacatttattttgattaagtcttcgatcgattagtattcgtcagctccacatgtcaccatgcttccacctcgaacctattaacctcatcatctttgagggatcttataaccgaagttgggaaatctcatcttgaggggggcttcatgcttagatgctttcagcacttatcccgtccacacatagctacccagctatgccgttggcacgacaactggtacaccagaggtatgtccatcccggtcctctcgtactaaggacagctcctctcaaatttcctacgcccacgacggatagggaccgaactgtctcacgacgttctgaacccagctcgcgtaccgctttaatgggcgaacagcccaacccttgggaccgactacagccccaggatgcgatgagccgacatcgaggtgccaaacctccccgtcgatgtgaactcttgggggagataagcctgttatccccggggtagcttttatccgttgagcgatggcccttccatgcggaaccaccggatcactaagtccgtctttcgaccctgctcgacttgtaggtctcgcagtcaagctcccttatgcctttacactctatgaatgatttccaaccattctgagggaacctttgagcgcctccgttaccttttaggaggcgaccgccccagtcaaactgcccgcctgacactgtctcccaccacgataagtggtgcgggttagaaagccaacacagctagggtagtatcccaccagcgcctccacgtaagctagcgctcacgtttcaaaggctcctacctatcctgtacaagctgtgccgaatttcaatatcaggctacagtaaagctccacggggtctttccgtcctgtcgcgggtaacctgcatcttcacaggtactatgatttcaccgagtctctcgttgagacagtgcccaaatcgttacgcctttcgtgcgggtcggaacttacccgacaaggaatttcgctaccttaggaccgttatagttacggccgccgtttactggggcttcgattcgtagcttcgcagaagctaaccactcctcttaaccttccagcaccgggcaggcgtcagcccctatacatcaccttacggtttagcagagacctgtgtttttgataaacagtcgcttgggcctattcactgcggctcttctgggcgttaaccctaaagagccccccttctcccgaagttacggggtcattttgccgagttccttaacgagagttcgctcgctcaccttagaattctcatcttgactacctgtgtcggtttgcggtacgggcacctattttctatctagaggcttttctcggcagtgtgaaatcaacgactcgaagacacaatgtcttctccccatcacagctcagccttaacgagtaccggatttgcctaatactcagccttactgcttagacgtgcaatccaatcgcacgcttcgcctatcctactgcgtccccccatcgattaaaacgattataggtggtacaggaatatcaacctgttatccatcgcctacgcctgtcggcctcagcttaggacccgactaacccagagcggacgagccttcctctggaaaccttagtcaatcggtggacgggattctcacccgtctttcgctactcacaccggcattctcacttctaagcgctccacatgtccttacgatcatgcttcaacgcccttagaacgctctcctaccattgtccaaaggacaatccacagcttcggtaatatgtttagccccggtacattttcggcgcagtgtcactcgactagtgagctattacgcactctttaaatgatggctgcttctaagccaacatcctagttgtctgggcaacgccacatccttttccacttaacatatattttgggaccttagctggtggtctgggctgtttccctttcgaacacggaccttatcacccatgttctgactcccaagttaaattaattggcattcggagtttgtctgaattcggtaacccgagaggggcccctcgtccaaacagtgctctacctccaataatcatcacttgaggctagccctaaagctatttcggagagaaccagctatctccaggttcgattggaatttctccgctaccctcagttcatccgctcacttttcaacgtaagtcggttcggtcctccattcagtgttacctgaacttcaacctgaccaagggtagatcacctggtttcgggtctacgaccaaatactaaacgccctattcagactcgctttcgctacggctccacatttactgcttaaccttgcatcaaatcgtaactcgccggttcattctacaaaaggcacgccatcacccgttaacgggctctgactacttgtaagcacacggtttcaggttctatttcactccccttccggggtgcttttcacctttccctcacggtactggttcactatcggtcactagagagtatttagccttaggagatggtcctcccagattccgacggaatttcacgtgctccgtcgtactcaggatccactcaagagagacaacattttcgactacaggattattaccttctttgattcatctttccagatgattcgtctaatgtcgtcctttgtaactccgtatagagtgtcctacaaccccaacaagcaagcttgttggtttgggctcttcccgtttcgctcgccgctactaagggaatcgaattttctttctcttcctccgggtactaagatgtttcagttctccgggtgtgccttctgatatgctatgtattcacatatcgataacatgacataactcatgctgggtttccccattcggaaatctctggatcaaagcttacttacagctccccaaagcatatcgtcgttagtaacgtccttcatcggcttctagtgccaaggcatccaccgtgcgcccttaataacttaatctatgtttccaccatttttataagtcaaacgctcacatacggcttcgttttcattattttaaatgctcatttacataagtaaactctgctttaaaataatttaactcattgtctgctaaacgttttcttttataaaaagatttaaacgcgttattaatcttgtgagtgttctttcgaacactagcgattatttcttatgaattcaagcttatttaaaactctttattcactcggttttgcttggtaaaatctatattttacttacttatctagttttcaatgtacaatttctttttagtcaagcgctcgcatactgctttattttcaaaaaatcaaatgctcatttacaaaagtaaactccgctttaatttttcttaatgcattgtctgacaaccgctttctttaaaaagaatagattgtcaagcgctcgcatactgctttattttcaaaagcaatatcactttaaccaaaaaatatttgaatgttaaataaacattcaaaactgaatacaatatgtcacgttattccgcatcttctgaagaagatgttccgaatatatccttagaaaggaggtgatccagccgcaccttccgatacggctaccttgttacgacttcaccccaatcatttgtcccaccttcgacggctagctcctaaaaggttactccaccggcttcgggtgttacaaactctcgtggtgtgacgggcggtgtgtacaagacccgggaacgtattcaccgtagcatgctgatctacgattactagcgattccagcttcatgtagtcgagttgcagactacaatccgaactgagaacaactttatgggatttgcttgacctcgcggtttcgctgccctttgtattgtccattgtagcacgtgtgtagcccaaatcataaggggcatgatgatttgacgtcatccccaccttcctccggtttgtcaccggcagtcaacttagagtgcccaacttaatgatggcaactaagcttaagggttgcgctcgttgcgggacttaacccaacatctcacgacacgagctgacgacaaccatgcaccacctgtcactttgtcccccgaaggggaaagctctatctctagagttgtcaaaggatgtcaagatttggtaaggttcttcgcgttgcttcgaattaaaccacatgctccaccgcttgtgcgggtccccgtcaattcctttgagtttcaaccttgcggtcgtactccccaggcggagtgcttaatgcgttagctgcagcactaaggggcggaaaccccctaacacttagcactcatcgtttacggcgtggactaccagggtatctaatcctgtttgatccccacgctttcgcacatcagcgtcagttacagaccagaaagtcgccttcgccactggtgttcctccatatctctgcgcatttcaccgctacacatggaattccactttcctcttctgcactcaagttttccagtttccaatgaccctccacggttgagccgtgggctttcacatcagacttaaaaaaccgcctacgcgcgctttacgcccaataattccggataacgcttgccacctacgtattaccgcggctgctggcacgtagttagccgtggctttctgattaggtaccgtcaagatgtgcacagttacttacacatatgttcttccctaataacagagttttacgatccgaagaccttcatcactcacgcggcgttgctccgtcaggctttcgcccattgcggaagattccctactgctgcctcccgtaggagtctggaccgtgtctcagttccagtgtggccgatcaccctctcaggtcggctatgcatcgttgccttggtaagccgttaccttaccaactagctaatgcagcgcggatccatctataagtgacagcaagaccgtctttcacttttgaaccatgcggttcataatattatccggtattagctccggtttcccgaagttatcccagtcttataggtaggttatccacgtgttactcacccgtccgccgctaacatcagagaagcaagcttctcgtccgttcgctcgacttgcatgtattaggcacgccgccagcgttcatcctgagccaggatcaaactctccataaaaattatgatgtttgattagctcataaatactaaataatgtttgtaacttatagttacgtttttggaattaacgttgacatattgtcattcagttttcaatgttcattaaaattatctatggagcgggtgatgggaatcgaacccacaacatcagcttggaaggctgaggttttgccattaaactacacccgcttatttaattaagaattttgatgcggccgagaggacttgaacctccacgggatttctcccactaggccctcaacctagcgcgtctgccattccgccacgaccgcggatataggcatttaaaacatcttcgtttttcagaacgttatttattatattatgtttaaaaatatttgtcaataacttttaatcgtttttttacaataaattaatttgtgttatcagttgttaacacaacgctatttataataaaacattaagaacttattgtcaacatattttataaattaaatttagaattgactgtctttcaaatcaaagtttatttaatttgttcttttttaaggaacgtgtttaatcatactaactataagctgtacagtcaatagaaaagttcaatcaaaatgtcattaaaaatgtataattatcttttgtgctactttaaagctttaattgggtaaagtttatatattatttattactaaaatacgtcaagatttttaatctaatcaatttaatttcatcctatcaagtcacaatttatgccattacctatatcataagtagaaaagccgagattgcgaagtattaaattacgacaatctcggctttaaacattttataaacacaatttcttcttattcaattactatgtttaccaatcaaaataactcactgataaattctatataaattccatacaactcataaataatcttacatatacacgaattagctctatttgtattgtacttatttcaattgtcttttcattcttaattttccattgcaatgtccgcaacgcatacgattcgtatcaactttacggatacgtatatattttgcatgacatttagtgcaataatattcataatttgcccgttgttgatagctttcaatgctgttacaaaatctaggcgctccaacctgttggctcaatcgtttaaaatcttgatctttatgttgataacctttaccagcaatatgcaagtgataatgacataattcgtgcagtataatttttacaacagcatcttctccataatgctcatattgttttggattaatttcaatatcatgggactttaaaagataacgtccgcctgttgtacgtaaccttttattaaaatatgcacaatgtcgaaacgtacgtccaaatttttcttccgaaaggttctcaaccattcgctgaagtttgtcattattcatgtggatcaatcatcgttaatgatactttgtctttatttttgtcaatactgtaaatccaaacgtcaacgatatcaccgacactgacaatatccattggattttttacgaacttcttagaaagtttcgaaacatggacaagtccatcttgtttaacacctatatctacaaatgctccaaaatctactacatttctaactgtgccactcaatttcattccttcttgtaaatcttcaattgatagcacatcggatttaaggattggtgtttcaaactcgtcccttggatctcgattaggtgctttcaaggatttaataatatcctctaatgtaggtacaccgacttgtaattcaatcgccagttcatccatatccaatgaatttaatttatcttttaatgcatcactacctaaatcattgccaccaaatccgagtttatctaataactgatacgttactttatagctttcgggatgaatcgatgtattatccaatggctctgaaccgtctactattcttaaaaatcctatactctgctcaaaagttttagcacccaaacgcttaatcttgcttaactctttattatgctttattgcgccattttcttctctatatgcaattatatttttagcaatttgcgaacttagaccagacacatattgtaataatgatgatgatgctgtattgacatcaacacctacttggttaactgctgtttcaacgacgaaagttaatgcattttctagtgctttttgattaacatcatgctggtattgtccgacaccaatagatttaggatcgattttaactaattcacttaatggatcttgaacgcgtcgtccaattgatacggcacttctttcttccacttgaaaatcaggaaattcatctctagcaatttctgatgctgagtatactgaagcgcccgcttcattaacaataatgaattgtactggcaatgcatactttttaattaaatctgcaacaaattgttctgtttcacgacttgcagtaccattgccaattgcaattaattgcacatcatacgctttaaccatttgtacaaaatccttctctgctgcctcttttttagaaactggtggatgcggataaatcacaccttttgctataaaagtaccgaatgggttaatgactgctaatttacaacctgttctaaatgctggatctacgcctaatatttgtttacctttcattggaggttgcagtaatagatttcttaagttttcactaaaaacatctattgcatgattttcagctttttcagttaaatcagcatggatttcacgctctatcgaagggacaattaagcgtttcaagctatctttaatcgcctctaaaatataactgcgatttacattattatgattgatttcttgacgtgcaatgaaatcctctactgatgtcgtatcgaattcaaactttacagataatactttctctttttcaccacgattaacagctaaaactctatgattagcaatgcgtttaattggctcactatatgcatagtacatttcaaaaatacctttttcatcttcagcatttttctttttagatgtagttaacacaccttgatgatacatatcttttaaaatttttgttctatatttaggattatctgaaatttgttccgcaataatatcttgtgcacctttgatagcatcttcaaccgattgcacttcttcatttataaattgttgtgctttttcttcaattgagacttcatgtttacgtgccttcatccatatcgctaatggctctaaccctttacgtttcgcctcagttgcccttgtctttttcttttgtttaaaaggcctatataggtcttcaacacgttgtaatttgttctgttttaaaatatccttctttaattcctcagtaagtaatccttgctgttctatatttttgataacttcttctttacgtttttgtaaattgaccatatattggtattcgtcatcaatttgctttatttgaacttcatctagtccaccagtttgctcttttcgatacctcgcaataaatggtactgtatttttttcttctagcagtgttaatactgcttcaatttgttttttactaaattgatatttctctatgattgaattaatcaattgattgtccatttacttaacccacactttttcttaaatttactcatttattttaacatattctaaaatacttctattaaggtatgatacttaatgtaattttcacttccaaaacatttaaaacgaatgattaggtcatactatattttaaaacgcactaagattattgaaaatgacacaccatcatttctaaatttcataatctaagactactttttttattctaatagcaatccacctatttaaaacgacaattagatatcttcttcacttaaattattaatactatatcgcgacatttatgtggatacacattaaactacgttaataatgtattaattcgaaaatcttaattaaattaaaaatacccctcgatttcaatttaataatcaagggataattatatggatttttcattataaaacgtatcattaataagcaaattctatttatgtgctgcttcttgtaatttcttaattgccgttctttgaagtcgtgatacatgcatttgacttaaaccgatacgctcacctgtctctttttgactcaaaccttcaataaacgtacattgtatgatttctcgttcgcgatcagataatataggtaatattttttctaaaatcatacgtttttcagttaagtcataatggtcatcttgttgtcccataatatctaatagcgtaacagttgaaccatctttatcagcttcaatggaatgatcaacacttaacgcattataactttgtcccatttccattgcttctaacacttcttcttctgaaacttctaatcgatcagctatttcactgatagaaggtgaacgctctaattcagcggttagttcatcgctcacttttttgattcttggcccaatttctttaatacgtctcggaacatgtacactccaagttttatctcgtagatatcttttgatttcaccgattacagtaggtactaaaaaggcttcaaacttccgttcaaaggacatatcgaatctatttatggcacctattaaaccaaccataccaacttgaactaaatcttcgtgatgtgattgtcctttagaatatttatatgccaatgactcaattagtttttggtaatgtttaactaacttatcctgtgcatctgtattcttattttcttggtgttctttaatccattggttaatttgctcaggtgaaatttcattagctgatttcgactctttcgccattatttcgcacctgctctttttttatatacttagtcatactgattgtcacaccagattctttatatactgtgacttcatccattaaagattcgattaaaaataaacctaggccaccttcgcgtaaaaagtctatattttcgtctttatcgtaaggacctatttttgatttagttgtttcataatcaaaactgtcacctttatcagaaataacaattttaattttatcttctaaaatttcaaaatatatgttaataatgcccacattgttattttctttgtatgcatgtttaactgcatttgtcacagcttcactaactgcaatcttggcatcttcaatatcatcatatgtagcaccagctctcgaaaaaacgccagaaagtgttaaacgaattaaacttacatactctgccgatgctggcacgcgcatttcgataaaatcttctttagattgcatgttattcgacctccgttccttcattaacatgcattaaatccttaagaccagtaatttcaaatagtctaccgatacgatctgacacacctaaaatgtatagttctttatcattttggtttaatgcttttaatgtacctacgaataaacctaaacctgtcgaatccatataactcacattttctaaattaacataaatatcacgagttccatcttgtctcataggtgttaaaacctcttctaattcaggcacagtataaacatctaattctccaccgactttaacttcgtaaaatttatcttgagtggttgtttctatattaagattcatttcattacactcctacttattaaaaatatttatcttcattttaagcgctgtatccaccatatttatatttcaaattattatatacccatcgaaataatttctaatcttcttttttaaattaatttactctttttataatcaaaatagtcatatcatcttttttatttgggttttgaagctttaaaattgcttcatagataatttgaacaatatcttgtgggtgcatatgtttatgttttttaatatattctaaaagtttttgtttatctataaaggtaccttcactatttctagcttcagtcacaccatccgttaaaatgataattaaatcatcaaggtatattggaatttcttgttgttgatatcgtgtttgtgaactgattcctaacactctacctctaactgaaatttcttcgaattcttctttttcagcgcgataaatatatccaggctcatgaccagctgaactacaatacaataaatggttcatttcttcatataaaccataaaacattgtgacgaacatattttgattaatattcttttcaacaacacgatttaaacgttttaaaccatcactcggtaattgtgagtgtccataagaatccatgccaaactttatcatactcattgctaaagcagctggtataccttttccaatgacatctgcaacagcaaagctcattgtgccatcgttatggtcaattaaattaaaataatctccacttactttttgtgccgccactgaaataacgccaatttgaatactatcaaattgtggaatatctgttttaagcattgtttgttgtaagctagaagctaagtctatctctttatcgtgaacttgaagtttatctaccaatctttgataatctcgataactataaccaaagcctttaacgatttcttgtaagacatctaatgtcttgaacacatcttcacgcgttaagtttaacgtcaatatatagtttttgtgaatatcgacaatgtcttcaggcaagacgtccttacgaatcacttcgtcagtgtatttctcacacttttttatcaattctactttatcttggcacgttaaactttcatcaattaaacccttataatgttgcttaaattcttccacgattagttgcctcctcacttcccttacaaagcaaatgcttaagcaaggataattatgattcacttactaacatttatttaattgcacttatcaattttgtcgtttgcaattttgctgtagatgatacttttaagctaaaaaaactttaggatggaatacctaaagcctaaaaaacttaagacatccttttataataaaaaatatgaatatcataactggtatttgctaaaatctttgtttataagaaaattcttcgtacagaatttagaaatagttataattattataaagttattgtcttttatatcaatattttatttatctctgaaaaatacatataatagacgcctaatttttctggtgagctactgcattcagccctaaactaatcattagtgcattatctacttctttcattttatcatcggataagtacgtcagtttttctttcaatcgttttttatcaagtgtacgaatttgttctaataatataactgagtctttatccaatttatactttttcttttcaatctctacatgtgtcggtattttcgctttattaatcctaccagttattgccgcaacaataactgtaggactatatttattaccagtatcattttgaattatgactacaggtctgactcccccttgttcagatccctgtactggtgataaatctgctaaataaacatctcctcgtctaatcattcattcgttgaattagaagataaatatgtttcgttgcaatcgcatgcttcacactctatcggaaaagcttcgttcgctagggagagatttaaatcagccatttgtgaatatccttcttttaaagattgttctaagctatgacttctattttgactaaaagataacatatgagaacctccaattgattccaaaagttattaaatgacctttaattactctaatgataacaaattttatatgcactgaccatattattttaacaattcatttgttacaaaacgttgatcaccatcatgatagattcgcggcaaacgtctcgacaagttacaaagcacttcataattaatagtatgttgcttttcagctaccacatctaccgactgtggactttctctatgattatctattaaaatcaccgaatctccagctttaacttgatctggcactttaacaattgtctgatccatacatacgcgaccaataacttcgcattgatgaccatttacatttacaaagctaccttgcattatgcgtaaatagccatctgcatatccaataggtaacaatgctattgtagttgggtcagtagctgtataagttgcaccataacttacagactcacccgcttgtagcgtctttgtttgaactacattagcaattaattgcacacttggtttaaggtgtactttaactttttgctgtacatactctgatggataatatccataaagggaaattcctggtcttattgcattacagaattggcaatccattagtagagaacctgctgagttctgacaatgtatatattcaggtttaattgcttcattgaccatatctttaaaacgttgatattgttcagttgtcatatctcctggttcgtcagcacaggcaaagtgtgtaaacacgccttcaaatacaagttgctcatattgttgaatgatttcaatcacttcttgatacgttttagtatctttaatacctaaacgtcccattcctgtatctaatttaatgtgcaaccataactttttctcttgctcaccagaaatgtttttaattgcttctttcaaccactgtttagacggaaccgttaaggcaactcggtgttgtatcgctttatcaatatctttagctggtaacacacctaagactaaaattttagcagtaatcccatgcattctaagttctatcgcttcatctaacgttgctacagcaaaaaatgtggcgccattttccattaaatgacgtgctactttaacactacctagtccataggcattggctttaacgacagccatcactgttttatttggatgcaatgtactgaatactttaaaatttgatgcaacagcgtttaaatctacattcatatacgcagatctataatatttatccgacatattacttcctcctgtaattcccacacgttttaaaactagatcttaattatcattgtataacaaatttaaaatgctgacttttctaaaacaacttggctcatcgcataatgctcagtgtgtgagatactaacatgtacgatgaacccttcgtaatcaatctttggtttgccaagttcgtcgttgtaacagtctatatcgttaaaagctacatgttttcctaagcctgtgcctaatgctttactgaacgcttcttttgtagcaaacctgccagctaaaaattcaattttacgttgctcatgtgtgaaattgttgaatttgtgctgttcatttttagttaaaatccgctcaaccaattttggctgcttactatataacacttttattcgatcgatttcgattaaatctacaccaattccatgtatcattgattattcctcatttttattgttttctaaatgtctctcgttatttaaccatcgtttcaatctacgtgcttcacttctatctattaattcaatttcagcttgaccacccgctgtataaagggtcaaagttgctaatcgatagcgtctcattataggaccaacatcgatatcaatattttgaatacgaaaatatggtattactttttcatccaaaaataaaatgccgtttcgtacacgcaaatggtgtttttcaaatgcatatctgcagtgcttatatcgatagactggcgctatgacaagcgtgaaaacagcaacaagtaatattataatcacactactaacaatggataaatggttatctaaaatctcccaaaatagccagttcaaaatattaaatgcgattaaaagtacaagcgctatgggtatccaaaacagcacagcacttaacctcatcacttttttagcgtgtggtgacataaaattataatccctcatcattttcacctcttaaataccatgatttcaatttatttgcatcttcacttcttgcgtattttaagttaatcgattgggctcccacacctttcgcaacaataaagctaaaattatttaaattattgcgtttaagtaatgtatgttgccaagtgtcaaatcctataatgtgatgcgctttaaaataataaatatttcgtttcaatagctcgaaattctggatagtaatttgttcttctgtcattttaaaacccgcatgtttgacataaagatatcctttgatcacaaataaaccaataatgactattgttataatcgtaaataacaataataattgattccaaaaataacagcctatacctgccatagctatgacaataatactaggtattaaaaagtgtctgtggaaacctgacaaaggcataccttcattaacttgttgataagataaatctggtactaaattctggataatttgatatgctttgtctcgtttaataaacggcaatatcggcacactacctgaatcattgtcatcatcttcgatttttttattttcaaaatcacttgtgatgataaaatgtattgctgtgtagccaaataatcttcgtatatatgactgacgttcaacaacagcttgcaatcgtttcgttggtacagttactttcttcttgttaaagagaccatattcaattttaagttgctcattttcaagcatcaccgaaaagccataaaatcttatcatcgttataattgttccaataatatatgccactattaatactagtaaaatgatgattaatactgaaatacttacaatttgaacccattgactaatttcatgatttagcttcgaccacgggatcaactctcttacagcaccgtaaatcggtactaaagctgctaacgttacaccaatggcaccactggtcattgccataaatagtgattctttaaaattcatctgatatataggaatgcgtttatttttctgattaagcatactatcagtgttctgtacttcatctaaacgaccttctgcgatgtcttccacattaccttcaatgtcatgattacagttgtcattcttctcagcactagacttttgcgccacttctgtctttaactctgtttgcaattgatcaatatatcgttcaagatattcaccttgttttttcgaaataacacttaagacaataccatcacttggtgttttgatttgtaaatccacaccaccaataatttgattgacgaccccttgtgtcatatcaacggactgaatacgttttatatttaattctttacgctttttattaaaaatacctgttgttaaaatgaaataattatcctcaatccaatatcgcgtgttcataattccgacaatttgagaaatgtatgatattaaaaagaatacaaatacaatacctatccataaatatgattcgggattcgtataatcaaaatctttcaattgaaagataatgaaaataaaaaagacgactatgttttgtttgatagcattgattatgccattaaaatatgaaatcggatgtaatttttgaggttcagacatcactttcaacccctctcaaattcgacatagttctctcttcgattattttaacatcgtcatgagacatcatcggtaaataaatagtatgacctgcagtcataaatccaactttatacaaattaagcactttactaattggattagatttaatcgacaagtattgtaaacgttcaattcgactcgtttcttctttatatataaaaaatgatgtacgatattgtacacttagttgatcaactttataaaagcgacaatgatattgccataaaggcttaataaataattttaatgtactcagagcacctaaaaccaacaaaatataaagtaagtaatgtggccattcaaatcttaaccatataaaataaaaaatgacatacaccgatacactcaatataaattctaagccattcgtaatgtagtaatacaacaatgctgacttaggactcttagtcaacttagtataatctgacatatacccctctccccaaataaaaaattatacggatttataatctatttcattttatttttatatgttgataattatagcatatggaatatttcatgctaatttattcttcctaaaggtacatctaaaaatttagttaagcagaaagtgcttgaattgctaaaaagacaccatgttataattttatcaacatgatgcctttcatctataatcaatctttcatcttatcaagagcaatatttagttcaagcacattcacataatcatttgttaacacaccacgctgcttacgatgttgaatcaagtcggccactcttgaagtagatatatgacgagcatcagcaatacgaggtgcttgcttcaatgcattttcaaccgtaatatgcggatctaagcccgacccagaacttgttgcagcatctattgttacatttgaattaccaaatttaacatgatgtttcatgcgtgctattaattcggtgtttccattcgattcattacttccacctgaagatacgccgtttttatataatttttcaggattcatattataatcaactgcactcggtctcccgtgaaaatatcgtgtctctgtccagtgctgtccaatcaattttgatccaactatacgattgtcatacgtaattaaactgccatttgcttgttgacaaaaaaatatttgaccaattaacgtgatagctaacgggaataaaaatccacataataccatagttattatcgttaaacaaatactatttcttatcgtattcatggtacaggctccttcctctttacacaaaaaattgtacaatcatatctattaatttaatgcctaaaaacgggacgattaatccacctaatccataaatcaacatattatttataaagattctatcaatgctgtaaccctttacttttacacctttcatggcaattggaattaaggcaacaatgattaatgcattgaatatcaaagctgatataattgcagatttaggtgacgataaatgcataatatttagtgaagtcatttctggaattgttgacatcattagtgcaggtaaaattgcaaagtattttgctacgtcattagccaaactaaatgtcgttaatgcacctctcgtcattaataattgtttgcctatttttacaacctctattaactttgtaggattcgaatctaaatcaattagattagctgcctctttagcactaattgtccctgagttcatagctaatcctatattcgcttgtgctagcgcaggtgcatcatttgtaccatctcctgtcatcgcaacaatatggcctttcgcttgttcatctttgatgactttaattttatcttcgggtttacactctgcaacaaatctatcaaccccggcttcttttgcaattgtagctgctgttaaagcattatcacctgtacacataactgtttcaatccccatttttctcaattcagtaaatcgttctacaagaccatctttaatcacatcttttaaataaatcacgccaagcatgacattgttttcaatgactattaatggtgtgccacctttactcgatacatccatacagagagactcaatattaagaggaatattgccttgttgttgtttgacaagatttatcatactattaggtgcacctttgaataccgatatttcatttgtaatgattccgctcattctagtttcagctgtaaaaggcttatatgtgccatcaatgtctttaggcagctcatttatatacatctgcttcgctaatcgtacaatactttttccttctggcgtatcatcgtagattgatgacatataagcagcgactatcaatttttcaagcatttgttgattcactggtaaaaattcactagcgattcgattgccataagtgattgtccctgtcttgtctaaaatcattacatcgacatctccacatacttctacagcacgcccacttttcgctaatacattgaattgagtaacacgatccatgcctgcaataccaatcgccgataacaaaccaccgattgtcgttggtattaaacatactgttaacgcaatgagcatcgcaataggtaaaattaaatgcaggtaagatgctattggatataacgttacaataacgactaaaaatataattgttaacgttgttaataatgtaaaaagtgcaatttcatttggtgttttatttctttccgccccttcaactaaggcaatcattttatctaaaaaagatgtacccgcttcactctcaacacgtatttctaaccaatcagatgttacaagtgtaccgccaatgactccatcaaaatcgccacctgattcttttatcacaggtgcagactcaccagtaattgcagattcatcaacggttgctaatccatttattacaacgccatcagcagggattgtttctccattttctacccgaatattttgtccggcttttaactctgtggcgttcactatccgatacgcaccattttcttctatcaatcgagcagttaaatttgattgtgcttgtcttaaactatcagcttgcgcttttccacgaccttcagcaaaggcttctgaaaaattagcaaacaatatagttattaataatatgataaaaattgtaatcaaataacctcgcgatagatagctagttccaaatatgtcaggaaaacatattaatatcaacgttaaaatcattccaacctcaacgacaaacattatcggattttttattaattgtttaggattcagcttataaaaactcattttcaaagcttctatcaccattgtttgattgaaatatttatttacatgatgcattttttccatccctttactttattttaaagttaaaaattcaccaataggaccaagtaatagtactggaataaatgtcaaaccacttagtaaaacgataaatacgattagtgataggccaaaataaggtttatcaatcgctattgtatatttatcttgatggtatgattttttattcactaaacttgatgcaatcattaattgcaaaataattggtatataacgagaaagcaacataatgattcctgtagagatattccagaatgttgtatcatctttcagtccttcaaaccctgatccattgttcgcagcagctgatgttatttcatacataacttgtgaaataccatgaaaagacggattcgttatactttcacttgctccaggaatcataaaagcaagtgctgaaaatactaaaattaaaattggatgtatgagaaagactaagacaatacatttcatttcacgggcgccaattggcatatttaaatattctggtgttttaccaaccatcaaactgcatataaacaccgtcagtaagacaaatatcaataaattcataagtcctacgccttcgccaccaaatacaacatttagcatcattaataccattggtcctaatccacctataggcgttaagctatcatgcatgttattaacagaacccgttgtaaatgccgtcgtaataactgtaaatagtgctgacaaacctgctccaaaccgtacctctttaccttccatattcgctccataaatgcctaaattcgctagtattggattaccacgatactcactccacatagttaatgtaagaattgctataaaaatgaaaaacattgcgacaaataatatcaacgcatgacgatgtactcgtttaccatgcctacttaacatgcgaccaaataagaacaacattgacataggaagtaacatcatactgcccatttctataaaattgctccaaatatttggattttcaaaaggtgttgcagaatttcctgctaaaaatcctccaccattcgtaccaagatgttttattgattcaagtgatgcaataggtccaaatgcaatatgttgaatatgtccgcttaaagtccgaatcattaaattagcatgcaacgtttgtggtacaccttgagtcatcaataaaatactaattaaacatgataatggtaaaagtactcggacaataaaccgaacaatatcttgataaaaattaccaatgatattagttaatccagttaaacgtctcaacatcgctatacaaacggcgtaacctgatgcactagatgtaaacattaaatatgtcattacaatcatttgcgttaaatatgtcacatctgattcaccgttatagtgttgtaaattactatttgttaaaaaagatattgctgtattaaacgctaaatctatcgattggtttaaattatgatttggattaaaaaaaagccattgctgaactattagcaatacaaatgttataaaccccataaatccattaaatgccagaaaatgtttgacatatgttttagctgacatgtgttctaaatctgtgccgataattttaaaacacatattttcaaatctagtaaatattaaatctactcttgacgattgcaccaatgctacgcgatatagatatccactaaaaacatacgtaatcataaccatcattgttagaaacaaaattatttccatgataaccctcacttaatatatttctaaaatttttcactacgaattaaggcataaaataaatacaaaactaatgcaataactaccagtaataaaacgatgagcattgtcataacctccttacaacacaacaacatcgtaacaacttgtttatgagagaaatattaattttcaaacttagttattaagaaatcattaagatgtgtatgcagaaataaattttatagcatttaattgtgaagaatattatgatattgctatcgaggtgaaggttatgtcaaacactgaatcgctaaacataggaaaaaagcgtggatctttaacaatttacatcggttacagtccaggtgttggtaaaacatttgagatgctttcaaatgccattgaactatttcaaagtaacgttgatattaaaataggatatattgaaccgcatcaacgtgatgaaacaaatgcattagctgaacaattacctaaaatcacaaccaattttactaaacatggtagtcatcattttcaatatttagatgtcgaccgcataatcgaagaatcgccgacaatagtacttatcgatgagttagcacatacgaatatttctagagatcgtcatgagaaacgatatatggatattgaagaaattttaaatcatggtatcgatgttcataccactttgaacattcaacatattgaaagtttaagtagtcaaattgaactgatgaccgctgtacatgttaaagaacgtgtacccgactatttcataatgagcgccgatgtattagaagtcgtagatatctcacctgaacaattaattaaacgcttaaaagctggcaaggtatataaaaaggataggctagatgtagcatttagtaatttctttacgtatgcccacctaagcgaactgcgtacattgacgttaagaacagttgccgacttgatgagtgataaagaaaaagtccgacacaaccataaaacgtcactcaaacctcatattgctgtggcaattagtgggagcatttataatgaagcagtaattaaagaggcattccatattgctcaaaaagaacatgcgaagttcactgctatttatatagatgtattcgaaaaaaacaggcaatataaagatagtcaaaagcaagtgcatcaacatctcatgcttgcaaaatcattaggagcaaaagtaaaagtagtttatagccaaaccgttgcattaggattagacgaatggtgtaaaaatcaagatgtaaccaaattaattatcggacaacatattagaaataagtggcgagactttttcaatacacctttaattgaccatttaatgtcctttgaacatagctataaaatcgaaatcgttccaatcaaacaaatacctgttgaattgaaaatgaacaaatcaccctatcgtcctaaaggcaaacgtttcgccatagatatgttaaaaatgattttgattcaaataatttgtgtaatgatgggactgtggatttatcaacttgataagcatgagtctagtacgattattttaatgatttttctcatcggcatcattttattatccatttggacgcggtccttcatcattggctttttagcagcaattattaacgtatttgtttttaattatttttttacggaacctagatatacatttgaagtatatcgctttgactatcctattacatttatcgttagcattttaacaagtattttaacgagtgctttattaaaacaaattaaattccaatactccattactaaaaagcaactttatcgtacagatttattatttcaatttaatgattcgattaaacaaacttatacagttgaaaacttactaataaatgctggataccaaattaatcaattattgcaacaatcaattactatatacgttatcaatcaatcgaaagtaattaaaacaataccattgcaaaaccatatcgataatacgactcaacagcatgaacaagcattaagctgggtaattaaaaatgaaagacaagctggtgcaacaacagatacatttccaggcattaataaatggttgataccaattggcacatctccgattaaaggcattctagccattgattaccaaagttctcaagtgattaatccatatgatgcatcaatattagaatcaatgttaaatgaactttctctcgccgttgaaaatgtgacgttacttaaacaaacgagagaatccatgttacaggctgaacgtcaactgacacattcaaattttttaagatcaatttcgcatgacatacgtacaccgttaacaacaattatgggaaatttagatattttagtatcacatagtaaagatatgtctatcatagaaaaggaacaattacttgtgcatagttttcaagaaagtcagtatttatatctattagtgacaaatattttatcattaacaaaattacagtcatccaatgttcagataaaattgcaaccttatctcgttagtgaattagtagaagaaatcgatatgattttagaacgtcgccatttaaaaaagcgtataactgtatcatcctcagtagatttacagtttatacacattgacagtaagttgattttacaagctttattcaatttgattgaaaatgcagttaaacacacttctactgacaccaaaatcaatttatctattcgttatgctagcgatgaacaaatcgaatttgccgttatagacgaaggacctggaattagtttagaagaacaacaaaagatattcgagcctttttacacaggatcaaataaatattttaaagataaccaaaaagaaagcatgggactaggcttatatttagtacagactatcctacacaaacatcaatcaaacttacaatataaaccgaaccaaccacacggcagtatattctatttcaatatatatacagactttaatgaaggagacgtataatgcaatctaaaatattgataattgaagatgatcacgcaatcacacatttacttgatgttgcattaactttagattattacaatgtaactacagccgacaatgccacacaagcacactttaaaattcaaattgataaaccagatgtcattttattagatttaggtttaccagataaagatggattatgtttgatttcagaaatcaggcaacatactgacattcctatcattgtaataagtgcaagacaagaagaacaaacaattattcaagctttagataacggtgcgaatgactatatgactaaaccttttaatgttgatgagcttcgggcacgaatacgagtcatcgagagaatcgctaagtcacatcaagaaactaacattgtatttactaacggtttgctaagcatcgactttggctccaaatctgttgttattaataatcaggaggtacatttgactccaaatgaatttagcttgttagaactattgtcaaatcataaaggaaaagtactcacttatgagatgatattaaaacgaatatatggctatgttaataagactgaaatgcctagtttaagagtgcatatgacatcattaagacaaaaactttcacaatgtcatgaggacgcaaaagatattattaaaacacatccacgcattggttatcaaatgttgcagtggaaagagaaataattaaataaaaaagatcgctgctattaaacgaatgattggcagtgatcttttttatattcaacttattatttatcgcgtactagcgtcagcaaaaagccctattatttttttacaagaacatgatactgaaatttcataaagtttatttatgttcgattattcttaatttaagtagttgttatattctagattcatatttatatttacacagaatgatataaccgcatacagatctcaatccaattaaatatttaacctttaaaacgttagtactttgatatctacagagaatcaattattgaaaacaaaaaagagctcaagacattacatctttaagctcttaatctataaattatttttgatggtcagcaaatgtgcgacctttcataggtctgcttccaccgctgctcttctctttacggtcgaatttttttgtacttttcttcttacttgagtatccttttgaacgtttactcttactgtcaaatttaggattaccacgcttactatttctgttacgagaaccacttggtttaccgttacggcctttgcgagataatggtttttcaaaagttaattgaacttcaacttcatcgtttgcttctactaactcttgtaaaagtgcagcaactaaatcaacatcgttatattcatttaacaactctgtagaaatgcgtttcaagcgtgattctgactttttagacatccagttttcaactttttctttgatgtcatcttcacgtgcttgaagtacttctttacgatgtggtggacgaagtgcactcatttttctaccgtttgcatcttcaatttgtctgatataatccatttcgattggattaacaaacgttacagcgataccttctttaccagcacgacccgtacgaccaatacggtgtgtatagctttcagtatcttgaggtatatcaaagttataaacatgactcacaccagaaatatctagtcctcttgctgctacatcagtagcgactaaaatattaatttggtcatttttaaatttctttaatacttctaaacgtttcgcttgtgtaatatcaccatgtaaaccttcagctttatatcctttagaaatcaaagcacttgttaattcatcaacacgacgttttgtacgtccgaatacgattgctaattcaggttgatgaacatctaggaaatttgtaaatgtatcaaatttctctaattctttaacaattgtatagaattcttcgatttgtggatcagacatttcattattcattgtcttaatgatttttggtgatttcataaattgttgtactaaagcttggattgctttaggcattgtagctgagaacaacattgtttgacgttgtactgctggaattttatccataataaatctcatatcatcgatgaatcccatattcatcatttcatcagcttcatctaaaatcaaagtatgaattccgtccgtttttaatgtgcgacgatttaaatggtcgataacacgcccaggtgttccgactacgatttgtgggccttttttcaaggctttaatttggcgttcgataggcataccaccgaatacagtaacaacttggacaccttgtccacggctaaattctcttaattgttcagctacctgcattgccaattctcttgtaggtgctaaaatcaacgattgaaccccttgtttccctactactttctcaattaaaggaataccgaatgctcctgttttacctgtaccggtttgagcttgcccaaggatatcaattccttgtaacgcataagggatactgtctttttggataggtgtcggctctttaaatcccattgattcaagtgactgaaccgtattatccgaaatccctagttctttaaaattttgcaaaataattctcctttttacctgtttatttctcaatatacttttgcatataagttcattaatatttcatcaacttctatatagtaccaccaaaaaaatttaatcgcaataaagcaatttgcgaatatttattagaatcacattaattgattgtcatatttttgtcaaaaagctagcattagataagatgtaagcgttacgcatcattcgaataatcattataaaaaattttttataaaatacgtatatcgttaacattccacaacaaattttactgaaacacatgtgaaattagacattataatactacatctttttgtaaaacattatataaacattcaaactacttcctatataaagtgtgtacatagaattaaccttgatttagtttcaaatttatagatttaacataaaaagaaaaaggcaattttgtatttacacacaaaaccacctcttctttgtaatcttttagtattaattcaaatcatttttataagtaaaaggtccctcgactaatctctatgaaattaaagcatttaccacttcttctaatttcataccacgtgatcctttaactaatacacggtcatgcgcttttaaatcgtttattaaaacttctatcatatcgtctttagaattgaagtgttgtgctttttcgacatgttgctggcccgaatcataaatatacttcgcttcattaccaaacgtatacaacacatctatatgcttttcttctaaataattacctacaccgatatgcatttctttgctattttcacctaattctaaaacatctcctaaaattagaatgcgacgccctgtcaaagtacccagtgtatcaatagctgctctcatacttgtaggacttgcattataggcatcatttatcacagtaatatcattttctaatgtatgttgctccatacgcataccagttaagctgactttttttaaattttgatagattgtgttatatgtcaaacctaattcatgaccaaccgcaatggcaatcgtcgcatttttcatattatgctttcctaatattggtagatcataatgttctttattattaatcgtaaatgaaatacctgtagtatctctatcatcaacagaacaaactaatgcattatcagtagcaacaccgatactaatacattttgcattttcaacttctttaacatgcggtttcaataatggttcatcgccatcatatataaacgtaccattatcttttagacctattgtaatttcagatttagctttagcaatcccctcgcgcgaacctaaatcttgcatatgtgactcaccaatattagttataactgcaatatctggttgagtgaggtttgacagaaattcaatttcatggaaacctgacatccccatctccaatattgatatttcagtatcattatctaattccaaaatagttaaaggtaaaccaatttcattattgtaattaccttgcgttttcttaactttaaattcggtatgcaatacactttcaatcatatctttagtcgttgttttaccattagaccctgtgacggcaattactttaggatttacatgtctcaagtaagcttgtgccaattgttgtaatgccgttaatgtgtcttcaacccatataataggcccgcttacattttcatctataggtgtccctctttgataaaaagcagctccagcaccatcttgtaatgctttagagacaaagcgatgaccgtcaacattttcacctttaaatggtataaataacatatttttagaaattgctcgtgaatcaattgtgactccatttatctcttgatttaaaaattgatcttcaatttcacatggaatccatgattgaatttgctttaatgtaacattaatcataataacaacctcagttagtcaattttgtatttatttttctgtttatcctggtgacgttctttagcaagctcgataagttttgtaatcaattctggataagataagcccatattttcccataactttggatacatactgaaagccgtaaatccaggcattgcatttgtttcattaatatatatttggttgtcttctgttacaaagaaatcagcacggactaaaccagaacaatctgtcgctttgaatgcctctaatgccatatttctaagcgttaattgaacatcttcgtctaagtcagctggaatttgtaattgaaccttaccatctttatattttgatttgtaatcgtaaaacgcgacatcttttacgacttcacctggccatgtcgcttcaggatagtcatttcctaaaactgctacttcaatttcacgtgcgttaacgccttgttctataacaagcttacggtcaaattggaatgcttctttaataccttctttaagttccgcttcattattacatttactgatacctacacttgaccctaagttagcaggtttaacaaagactgggtaatttaatttatcatttactaattttaaaatgttatgttcatatttttcatattcagaacgtaagaaactaatataaggtaactgtggtaaccctcgatgttcaaataattgtttcattacaagtttgtccatagaacttgcagctgacaatacaccatttcctacatatggtacatccaaaacttcaaaaagtccttgaatcgtgccatcttcaccattaggaccatgtaataatgggaatactgcatcgtatggttgtcctgaactactttctttcaatagctgtgaaatctcaagcgcctctccattctctaaatgaagctcatcagtagatttaatttcagctgtaatattattttgctttctccaatcaccatcattggtaatataaatgatatcaacatgatatttgtctttatctattgcatttaatacattttgtgctgtcagaatcgatacttcgtgttctgcacttttccctccaaaaacgatacaaatattttcttttgtcatttcgttttcctccaatgatatatcagggtttgctaccttaatataaattaatattgatttagtcctattgttaattgatttattcgcatctttgaatcttaatagtatcacattttaatgctattttgcattttaaaaacgaggcgttatgtgtctgtatctatgttgattcatttataatcagaacaatattcccctctattttattcctaattcaaattgaaatctatagctgatatcactgtgatattctagctaatttttaaaaagtcatgtaaaattgatataaacattagtgagtataaaaggagtttgcaatgaattattcatctcgtcaacagccggataagcattggcttcgcaaagtagactgggtattagtagccactatagctgttttagcaattttcagtgttctgcttattaactcggcaatgggcggtggtcaatacagtgctaatttcggtatcagacaaattttttattacattttaggtgcaatttttgcaggtatcatcatgtttatttcacctaaaaagattaaacattatacatatttattgtatttcttaatctgtctattattaataggcttgctcgttattcctgagtcacctattacacctattatcaatggtgccaaaagttggtacacgtttggccctatcagtattcagccatctgaattcatgaaaattattttaattttagtattagcgcgtgtcgtttctagacataatcaattcacattcaataaatcattccaaagtgatttgttattatttttcaaaattattggtgtctcgttagtaccaagtattttaatattactgcaaaatgacctaggaactacattagtattagctgctattattgcaggtgtgatgttagtaagtggtataacatggcgtatcttagcacctatctttattacaggtattgttggtgcaatgacagtcattttaggtattctatatgcacccgcattaattgaaaatttattaggtgtccaactgtatcaaatgggacgaatcaattcatggcttgacccctatacatatagtagtggtgatggctatcatttaactgaatcacttaaagctatcggttctggacagttactaggtaaaggatacaatcacggtgaagtttatatacctgaaaatcatactgactttatcttttcagtgattggagaggaacttggctttatcggttctgtcatattgatcttaatatttttatttttaatcttccatctaataagattagctgcgaaaattgaagatcaatttaacaaaatctttatcgttggtttcgtcactttacttgtgttccatattttacaaaatattggtatgacaattcagttgttaccaatcactggtattccattaccatttattagttatggtggtagtgcgctatggagtatgatgactggaataggtatagtcttatcaatttattatcatgaaccaaaacgatatgtcgatttataccatccaaaaagtaattaatttaaactattttgagtttcaaatatcataacttttcaagatgacgttatatagtctatttacgtcgtcgatttaaaatgtcatatatagatattactcgataataacaatccctctttgaagtacacattgtaaaatgtacactctaaagagggattttgttatatagtacttgctttcattttagtaaatccagtcaaaaaagctatcatcgaatagtccgacgatagctttaacggtgtgtgattcacaatcacagtcaattattttaattcgtgacttactttattagatgctggcaaagtattaataatgtctaaacgagatttagtttttttaatattcacacctaatgatgacaatagtttgactacattttgaatcttttcaggacgtttcattattatcacctcgtttggatcgctttcaatattatcttaccctattcgacatacctttactacatcatttacaaaatttttaatttattttcaaaattaaaatctatagcgcactctacattataccctaaaatacaattttgtatccttcatcatagatttctttttcaatactattcaaatttgctggtgtctcatacgatacagttacttgaccatctattatattaatattcacttgatgaacacctatcatatttgaaatgcgttctgtcaattgacttacttgttcttctgtttcaattcccgctgtgtaaatcgtattttgatgtatcatcttaaactcctttagtctttaatcaatttttgaaaagtcactaataactcttccattgcctcttcctgagcaccttgattaactttattcataatacaacttttcatatgttgttctaataactttatcgcaacactgtttaacgccgaacgtgtcgctcttatttgcgtaaggacatcatcacaatagacatcttcttcaatcatgcgattaatcgctctcacttgtccttcaattcgatttaaacgtgatttaagattcgtttttatttgttcagaatgatgtgcattatcttgttcagtcatagcattcactccttcatttacattccttactatactatatcccataaaacacaacgtcaacacaaagtgtgtttttcaaactaaattgtcatgatatttaaattgcttcatgatacaattaataagatatactactcgtttaagattttcgatgggaggtttcaaatgatagagttattatccattgcactcaagcattctaatattattttaaattcaatatttattggtgcatttattttaaacttattattcgcctttaccattattttcatggaaagacgttctgccaattctatctgggcttggttactagtcttagttttcttgcctttattcggcttcattttatacttactattaggacgacaaattcaacgtgaccaaattttcaaaattgataaggaagataaaaaaggattagagttaatcgttgatgagcaattagctgctttaaaaaatgaaaacttttcaaattccaattatcaaattgtaaaatttaaagaaatgattcaaatgttgttatataataacgcagcatttttaacaacagacaacgatttaaaaatatacacagacggccaagaaaaatttgatgacctaatacaagacatccgtaatgctactgattatattcattttcagtactatattattcaaaatgatgaattaggtcgtaccattttaaatgaacttggtaaaaaagcggaacaaggtgtagaagttaaaattctttatgatgacatgggttctcgtggactgcgtaaaaaaaggcttacgcccgtttcgcaataaaggcggacatgctgaagcatttttcccatcaaaattacctttaattaacttgcgtatgaacaatcgaaaccatcgaaaaattgttgtaatagatgggcaaattggatatgttggtggttttaatgttggtgatgagtacttaggtaaatcaaaaaaattcggctattggcgagatacgcatttacgaattgtcggggatgcagtgaatgcattgcaattacgatttattctagattggaattcacaagccacacgtgaccacatctcctatgatgatcgttatttcccagatgtaaattctggtggaacaattggcgttcaaatagcttctagtggtcctgacgaagaatgggaacagattaaatacggttatttgaaaatgatttcatctgctaaaaaatcgatttatattcaatctccctatttcatacctgatcaagcctttttagattctattaaaattgcggcattaggtggtgttgatgtcaatatcatgattcctaataaacctgaccatccgtttgttttttgggctactttaaaaaatgcagcatccttattagatgccggtgttaaagtatttcactacgacaatggctttttacactcaaaaacacttgttatagatgatgaaattgcaagtgtgggaacagctaatatggaccatcgcagtttcacattgaatttcgaagtcaacgcttttatttatgaccaacaaattgccaaaaaattaaaacaagcttttatagatgatttagcagtatcttctgaattaacaaaagcacgttatgctaagcgaagtctttggattaaatttaaagaaggtatttcacaattattgtcacctatcttataaaatagaaatatgaggagtgtaactttaatgcaacaatcagacgtcattagtgctgccaaaaaatatatggaatctattcatcaaaatgattatacaggccatgatattgcgcatgtatatcgtgtcactgctttagctaaatcaatcgctgaaaatgaaggtgttaatgatactttagtcattgaactcgcatgtttgcttcatgataccgttgacgaaaaagttgtagatgctaacaaacaatatgttgaattgaagtcatttttatcttctttatcactatcaaccgaagatcaagagcacattttatttattattaataatatgagctatcgcaatggcaaaaacgatcatgtcactttatctttagaaggtcaaattgtcagggatgcagatcgtcttgatgctataggcgctataggtgttgcacgaacatttcaatttgcaggacactttggtgaaccaatgtggacagaacatatgtcactagataagattaatgatgatttagttgaacagttgccaccatctgcaattaagcatttctttgaaaaattacttaagttagaatctttaatgcatacagatacggcgaagatgattgctaaagaacgtcacgactttatgatgatgtacttgaaacagttttttacggaatggaattatcacgactagacattgaagttgtagtatgatgatgcgatgtaatggcgtgttgttgtggaagcttggtgtcatgccgttacgattctatgatatgttgttgggacgttgcaatgtgtattatgccgttgtgacgttattatttcacactgttacatgcattagtgaattgctgtggacatgttgcgttacgacatatacttctacactgatgaatcattgtgtcaagatgacattgcgatgaagaatgacaactctgttattaaccactttttacatactgaaatctcgttaatattatttcaaataaaaacagcagtaggatgactttcacatttgaaatcatcttactgctgtttctatttatgacatattgtataatgtgacactaagtttcgctattgaagcgaaaaataatgtgcgccctataaagttaaaattatcttcaacttttagggtgcacattatttggacttgctaaggttatttctttttctttttagacacaacttgtgtgtttttgccttttttattgctgccgccgttgtgctctctttcatacgcttcaatgaaaggttgtacttcttttttagcgactttttcataataaatgttcgcaaagtgtgtttgaactacaaggaacgccgcactgactgaccagtacaaaccaagtgctgatgctgagcttaatgaaatccagataatcataattggtgaaatgaccatcatcatgtaacccatttgacgttgttcgtctggcatcgttttacttgatacatatgcttggataaagtataaaacaccggcaataattgtaatccaaatatcaggacgtcctaaatcgaaccataagaagtgtggatatttaaacaaaccatctacaagttggtctttaagtacaaagtataatcccatgatgattggcaattggattagcattggtaaacaacccaacatactcttaatcgggttcatgtcatactttttatatacttgcattaattcttggtttgcagccattttttcttcttgtgtacgcgcacgtttcactttttcttgaattttttcaacttctggctttgcaactttcattttttgacgcatcatatgactatttttatagtttgacaacatgaatggtaataaaataatacgaattaccaatacaaggataataatagctaaaccataattgtcgtttaataagttatttcccaaccaatccaatacatttttcattggatctacgaatgtattgtagaaaaacccactacgtttttcaggtttagaatagtcacaaccagccaaaaagaccataatacctaaaaataatggtagtaacgcttttttcttcatttttccacctctatcattatattcacataggatttattctatcacattaatgagtacgtatgaaacaataagtggaaaaatttaactaattattaaaaaaatctttgaatcgattaacagtcttctcaatattttcacttttagaaatggctgaaatgactgaaattccattggcacctgcttctacaatcggcgccacattattagtattgataccgccaatagctacaatcggtagttgcggattcatttctttaaacgttgcaatcatttctggacctactggtatatgcgcgtcatgcttcgacggcgtaggatagattggtccaacacctatataatcaacatgagttaaatcagattttgcatactcatctaaatcactaatactaagtccaataattttatcagtgaaatattgtgctatctctttgactttcgcatcatcttgaccgacatgtataccatccgcgttaatttcttttgccaaggatacatcatcattaacgataaaaggcacatcatattgatgacagagatgctgtaattctttagctaatacaagtttatcgtttccttttaaagctgattcacccttttctcgaaattggaaaagtgtaatccctgcctttaatgctgcttctaatacttcatgaatagttcgatgactcggaacatcggaggtcccacaaataaaatacacatttagatacgattggttaaacatattattccacctcttgaatacgaatccgttgttgataggttgtttcatttaaatgatataacgtatcaagcaacaatggtgaaaacgtaccaggaccaccacaattttcattttcagcagctacctcagcagcaatattaaatacgcttaccgcttcaattaacgcttctatgtctggttctgtttctctaaataaaaatccagcaataacgcctcctaataaacaaccagctccagttactcgtgctaataatggagatccattagctaatacgatggctttattatcttgaacaataacgtcctctttacctgtgattactattgcagttttatatgttgcgtaagcctttttcgctattgcaaccgcatcaagattagcatcactatctgtacctttcatagttgctgtatcatcaatcaacgctaatatttcagatgcattgcctttaattactgatactttcgctgatttcaataataatttacaaaattgctttcgatatgtagaagcaccaacagctacagggtcaaatacaataggtaagcctgcctcatttgccgtttgagcaatcgcaataatatcttgttcattttgtgctgttaaagtaccgatgttgattaatagcgcttgtgcaactttgtaaaattcttcagcttcttcgggagcttcactcattgcagggctcgcaccaatacttaataaaccattcgctgtaaaatttttaactacatcgtttgtataacaaattgttaatgggttttcaatacgtattttatttagataattcatcgtctaatccctctttctttaaatatgcaaaatgattcactggacctctaccacggccgatttcaggcgtatattgtatactcattgaaataaactttttagccttgtgtacagcctcaaataatggtctaccttttgcaagctctgcagttataactgctgaaaatgtacaccctgttccatgcgtatgttttgttttaaatcgttcattttcaaatgtttgaacaccttcgttagtaaataaataatcttttgctatatcagtatcatttgaatggccgcctttaatgatgacacctttactaccaatctcattaataaagatgtggccagcctgcataattttttcttcactatcaatggttagtcccgttatttcttcagcttctggtaaattcggtgttactacatcagctaatggcaataacgtatgctgcaagttttgctttgtgtcattatccattaatgaatcaccgcttttcgccaacataacaggatcaattacatacggaatagattcatgttgcattaaataatgacgaatcgtttccatagtatctgctgtagcaatcatccccgttttaatagcatgcggtaaggtatcgttgaagacactatcaagttgttcatctacccattgatgatttaaattatgaatatgttgtacgcccaatgtattttgagcaacaatacttgtaacgacgcccataccatatacaccacatgaatgaaatgattttaaatcagccattacgccggcaccacctgttggatcagtacctgcaatggttaatgctattttaggtttaatcatttacttttcctccaaattcccattgttctagtgtcatagccatattgaaaaatcgacgctcatgtatgcaactttctaaaaatacttgctttacttgttccaattccttgtcagacattgattcggctaatttattcattaatgcctcaaatacgttaattatgtcatccatttcagtactataaaaatcaaaccattttgccgtatctttttctctattaagcttatgatcactttgagagcgcttagctatttctgcataaatatatggacaaggtgccattgcagcaattgtataaatagcattttcacgactatgcgcttggaaatacatgtgttttatgtaatggtcgccacttggaggccaaacttttgttttaatgatttcttcgtatgattcaccaacaatttgcgctaaaatatcatgcgcaagtacttcaccttcaaccataaattctatttgctctactaaaaattttacgtcattcatgctattcatttttggaattaacaaagcatataagtttgtgaattcttttaaataagctgcatcagcttgtaaatagtgacgtaatgcatcagcttgtatattgcctaataacattttttgaataaagtcatcctcataaatatcattaatgattggctttgcagcttggtacaatttttgtgaaaattccattgtaaaaaaatcctccctaaataaaaaaactacttccaacatgaaagtagtttgacggcaatgttgctatactagccccatcacttcaataactactttcctacgttggtactaaccaaatcaggtcataagggtctgaacaattcatctcagccatatcattaggctcccctagtagttccttagtattcaattgcaaattaatcttagcaaacggtttcaacattttcaattattgttgctcaattgtattattatctttaaataataattctataatgacatatattttccaaataaaaaagaccggaacatatcgagaattccccgatatattccaatctaaaagttacttatataactattgattagctatgcataaatggcttatgcagtaacccaatgtccagcgccaccagtgttatataattttactgctgcggcatcttgaacactttcaggagcatttgctggtgatacacctttatatttagcaggtgctactgaatcccaagttgattgtaagaattgatacttaccagctgcacctgatgttggatttacagcatgaatattgccacctgattcacgttgagcaatttgttttagatgagcattcacatttactgatgaaccttctgatgcttttgattcagttggtgttgcagtaacttgtgaattgtttgatgttgatgcttgtggttgttgagtttgagcattttgtggtgcttcaacttcttgtgattgtacttgattagcttgaacagctgatggtgcaacattattagttgcaggtgcttgtgcactcatgtctgctccattagcacctgttgcatggtaattccaagcaaagtgtgtaccatctgattcaaagtgataagtaaacccttcatagtcaaatgtataattataagccccagcttcaattggtttttgatttaatgtttgatcatttgattgcgccatttgcgctaaagatgctttatttaagtccgcttcacttgcatgggcttcgtgacctgcatttcctgctacgattcctaaacctactgctaatgatgatgcgagtaatgttttcttcataatcttaaaatcctcctacaagtaatttgtttctctaaaagttttacagagactactgtaacatctgtaaaatccgtgcaggttacaacaaaataaaaaaatagccttgttttttacacagtgattacaacgaaatccctcataatttcaaatatgattctatcgagaattgtcatgacagtaaaaatgtttttcatttgcaattttttatgtaatcgttttgcaatctatggctattttctattagaaaaactacacaaaaagacgacctacacaacagtactagtcatgtaagtcgtttttaagtgagtatatttcaagttaattagatctataaaaaatttaggatggattaaatgtatattaaggatgtttaggataattggatttaaatttctaataagtcatgattatctatattttgagagtcaatatctaaaatactatctgagagaatttcattattttgggatttaggggacataaattttattgtttcaacatataattcagtgacaaagtgtgtttgtccgtctttatcatactttcttgatctcatttgaccagttataccaaccaatgtaccttgattagtatatttttctatattagaagctaacttgccaaatgctttacagaataagtaatcacagacgatttctccattttcatctttataatttcggtgcgttgcaacacaaaacgttgcaatttttctatcctccttttcaaatatttgtgcgtctttcgtcagtctcccgacaattacgattttatttagcatgtagtgtgtgattcacctcctatgcctatatcttaattactagcttaaaaatggtcaaaatggcaaattttatataattaatagctatagcatctcgttatttgttatatttaaagaaattagtcatgaaatgaccttaaatcttctaaataattcaaaaatcataaatattaaactaatgggatgtgggaatatgaaaacttttaaagcagtaaggtttcaaattgtgaatgaacacggcagaattatagaatatgaattagaagatggcgtaataattaataaagaggaaagtggcacgggttggttgcttgaaattgtcatttctaatgagcattatgaaacatttaaggaatatcaagacaatgaacagttattggatattcgtgtcgtcatcacgcgtccagccaatgatccagctttatttgaatctactgtgaaaagtattaaaaattttaaaacaacaatgtctatcgtatttgaatgtcatatttacactttacgtcaacagtatgctgaaagtttattagaacaacttattgatgatggattatctggtgaagaattaaaaaaatcatttaatcgaatgatgcagtctaaaccaaagttaaaggatgaaaaattagaagagtaaaataaaaaacattcaaagattatgccaacacattaaatctttgaatgtttttttgttttattttacatcttgaattgcaaatgtaagttcacaactacaagcaagttgaccatcgacagtagctttagcattacctttaccgattggtcctttaattttagtgatttctacttccaacgttaaagtatcaccaggtactacttgacgtttaaaacgacatttatcaataccagcaaataaagcgattttacctttattttcttcactatttaaaatagctaccgcacctgtttgagctaacgcttcagttattaatacgcctggcattaccgcatactcaggaaaatgcccttgaaagaatggttcgtttcctgatacttgtttaatagccacacaacgttgaccttcttcatattcaactactttatcaattaataaaaatggctgtctgtgaggtataatttgtttaatttggttataatcaaaaattgtttccatggttgaaatcctccattatattaatttactgaattaatcgttaatacgttcaatgtctgcacctaattgcttcaatttaccgtgtaagtcaacatagcctctatctaggtgcgttaattcagtaacgcttgttttaccatcagcaactaatccagctaaaattaaggctgctgctgctcttaaatcagtcgctttaacttgtgcaccttgcaattgacttttaccttcaagtttagcactacgaccttctacattgatattagcattcatacgtttgaactctgcaacatgcataaaacggttttcaaaaactgtttcggttacgactttatgaccatttgccgttaataacaatgccatcatttgtgattgcatatcagtcgggaatccaggatgtggtagagttttgatgtctacaggttgtaattccccttcagcacgtacacgaataccatcttcttgatagtccaattcaacgcccatttcttctagtttatagactaaactcgccatatgttctttgattgcaccacgtacaaaaatatcaccacgcgttatagcaccagcgattagtaatgtgcctgcttcaattctatctggaatgatagcatgttctacaccatgtaatgattctacaccattgattgtaattgtgtctgtaccagcaccagtaattctaccacccatttcattaatgtagtttgctaaatcgacaatttcaggttctttagctgcattttcaattaaagtcttacccttagctaatgatgctgccataataatattttgtgttgctcctacacttggaaaatctaaatgaattgatgtaccttttaatccatctttagcattagcataaatattaccattttcaagatgaatttctgcgcctaaagcttcaaaacctttaatgtgttgctcaatcggtctacttccaattgcacaaccaccaggcaatgcaacaatagcatgtcctagtcttgctaaaagaggtcccataactaaaatacttgcacgcattttactaacatattcatatggtgcctcttcatttagagtctttgttgcatcaacgacaacagcattttcgtcctttttgtatgtaacgtcagcatttaaagttgttaatacattatttattgtttctacatcacttaaagctggaacattaactaatttgctcggtttatcagaagctaataaagatgctgtcaatattggtaatactgcatttttagcaccttctactttaacttcacccgttaatttatttccacctttgattactattttatccatcgtaaatcctccacttagaactcctattactttacatttccctattttaaaattattttaagtcattatttaattatatctagttttgattacaaatcatagagttagacttattttattaaatattttacctgcgtcgagtattgtaacaaatctacaataaaattgcttactgcagtgcctaataaaatagcaacaaatatcatacacacttgtaattgagtggcgtatccttttttaaaaaattgatctaatctaattgattgtaaagcccaataggcaatacaaatacatacaacatgtaacactaaatggataactgcatattgtccgatataatccattttatcacctcataagattactgtattacattgtacatgaaaaatttaaataatgatacaaagtttaatacccgtttttagtaaagtttaagctaacttactatataattctttttacataaatatcataactataaaatatcttggtatgaaaaaatgtagctactttcaaaaaatgaaacgtcgactgcagatagtggtgaaggaaattttgattttagcaatctattagtgattgtaaaaagtaaaactattcttgggagtcggacataaatcaatgtctagactctatagtgttatatttggcagtagtttgcggggccccaacataaagaaatactttttctttagaaattagtatttcttatacatgagttttactcatgtattcctatttttaaatacacattagctgtgtttaatgataaagaaccactacatcataaatctttaagggttctttatcaattccttccccctctcatgttttgtatctttaaatcaatataattcaaaaaagggtcgaagatatgaaatcacatcttcgaccctttatttactattttaattcagccacacgcaaacggttatttgctctctctaaagctctttcggctctatgaatatcagtattgtcgtcatcattttccaagtgagactctgctcttgctttggctaatttagctctttcaacatcaatttctcttgcagtttctgcagtctgaacaatgattgaaactttatcttttctaacttcaacaaagccatcgcttacagcaatatattcagttccatcgtgaaatttcacttttacaaagcctgtttttaaagcagctacagttggaatatgtccactcatgacacctatctcaccagctgttgtttgcataacaacgagttcaacattatcacgattgtaaacagaaccattaggagtgacaatatctaggtttaatgtattcattatccattcctcctaattgttatacttcaacacccatatctttagcttttgcaataacatcatccatgctaccaactaaacggaaagcatcttctggaatatggtcatatttaccatctaaaatatctttaaagtttgcaactgttgtcttaacaggtacataagaacctttttgaccagtaaattgttccgctacgtggaagttttgagataagaagaattgaattctacgtgcgcgttcaactgtttgtttatcttcatcagataattcgtccatacctaagatagcaatgatatcttgtaattcacggtatttttgaagtgttgattgtacatcacgagctacttcataatgttcttgacctacaattgatggttccaatgctcttgatgtagacgctaatggatccacggctggataaatacccatttcagttaatttacgttctaagtttgtagttgcatctaaatgggcaaacgctgtcgcaggcgctgggtcagtatagtcatcggcaggtacgaataccgcttgaatagaagtaactgatccttttgttgtagacgtaatacgttcttgtaattgtcccatttcagtagcaagtgttggttggtaacctactgcagaaggcatacgacctaataatgcagatacctcagaaccagcttgtgtaaatctgaaaatgttatcgatgaataataatacgtcttgaccttgttcgtcacggaaatattcagccattgttaaaccagataatgcaacacgcatacgtgcaccaggtggctcattcatttgcccgaataccatggctgttttcttaattacaccactgtcactcatttcgaagtataaatcgttaccttcacgagtacgttcacctacaccggcgaatacagaaataccaccgtgctcttgagcgatgttgttaattaattcttggattaatactgttttacctacaccggcaccaccgaacaatccgattttaccacctttaatataaggtgctagtaaatctactactttaatacctgtttctaaaatttgaacttctgttgaaagttcatcgaatgctggtgcttgacgatggataggatcgcggcgaacagaatcactaatttcttctttaaggtcaattgtttcacctagtacattaaatacacgacctaatgtttcgtcaccaacaggtacactaatttctttgcctgtatcttttacatccatgcctctttggacaccatcagttgaatccatcgcaattgtacgaacaacgtcgtcacctaattgcagcgcaacttctaatgttagttgtattgtaccttcttctttaggcacatcaataaccaaggcgttattaattttaggaacttcgttatgttcaaatcgaacatcaattacaggacccataacttgagttacacggccaattcccatgctattttcctcctttaaatattattcaagcgctgcggaaccaccaacaatttcagtaatttgttgcgtaatttctgcttgtctcgctctgttatattctaatgataagtcatcaataagttcagttgcattatcagtggcatttttcatcgcagtcatacgtgttgcatgctcacttgcttttgcgtctaatattgttccgtaaatcaaactctcaacatattgaggcaagattacacttaagatagattctttatctggctcaaattcataagaagacaaatgaccatgtcccttaatagaatcctcttgagataatggtaatacttgtctagatgtaggcttgttttcaagaacgctgacataatgactatagtatatatttaattcatcaatttcttcttcactgtataagtctatagcatggttagctagtgcttgaacagatttgaaagaaggttgatcaggtacgtctacttgagaatactcaatgtcataacctctattttttaggaaatcaacaccttgttgccctaaaactacaatactgtattcgctactatcttgatgtttcgcttcaatatcagtaatcaattttttaagcacgtttgcactatatgcacctgctaaacctttatcactcgtgataactaaatatccacttctagtaattttacgaggtcttagcattggatggtttgtattgctacttgcccctgcaactgcagtaattgcatcttgcattttatccatatatggtgtgaattgttttgtatttttttcagctctacgaagttttgaacttgataccatgttcatcgctttcgtaatctgcttcatttttttggttgattttattcgagtatctatttctttaagagaagccactatctcaccaccttatactaaacttgtttattattcagatttgctaaagctttttttgaattcgttaattgctgtgtcaaacttctcagcatctggtaagccaccagtttctctgatttcatttaacagttcagtagcatttgattctgcccagtggtttaactcgtcttcaaaacgtgtgatatctacaactggaatatcatctaaatatccttttgttaatgcataaataatcaacacttggtgttcgactggtaatggtttgttttgatcttgttttaagacttcaacagtacgtttaccacgttctaatttacttgcagtaaattcatcaaggtctgaaccgaattgtgcaaatgattcaagttctctgtatgacgctaagtcaagacgtaacgtaccagcaactttcttcattgctttaatttgtgcagatccaccaacacgagatacagattgtccggcattaatcgctggtcttacacctgagaagaataaatcagattgtaagaagatttgtccatctgtaattgaaataacgtttgttggtacataagctgaaatatcaccagcttgtgtttcgataattggtaatgcagtaattgaaccgccacctaagtcatcgtttaattttgctgctctttctaataatctactatgtaagtagaatacgtcacctgggtatgcttcacgacctggaggtctacgtaataataatgataactcacgataagctgctgcttgtttagttaaatcatcataaacgattaaaacatgtttaccgttaaacatgaattcttcacccattgttacacctgaatatggtgcaatatataataatggagaaggttcagaagctgatgctgctacaacaatagtgtagtctaaagcgcctgcttgtcttaacttttcaacatttgctcttactgttgaatctttttgaccaatagcaacatagatacaaatcgtaccttgatctttttggttcaaaattgtgtcaattgcaattgttgttttacctgtttgacggtcaccaatgattaactcacgttgacctctaccaattggtactaaagcatcaattgctttgatacctgtttgtaatggctcatctactgatttacgatccattacaccagtagcttttttctctactggacgtgttttagttgtgttaatcggtccttgtccatcaataggttgtcctaatggattaacaactcttccgattagttcttcacctactggtacttccatgatacgaccagtacgtttaacttcgtcaccttcagtaatacctgtatatggtcctaaaataaccacacccacgtttgactcttcaaggttttgggctaaaccaagtacgccgttatggaattctactagctcaccagccataacgtcatttaatccgtgaattaatgcaataccatcaccaatttgtaatacagtacctacatcagttacggacatttctgactcataattttcaatttgtgagcgaagtaatgcactgatttcttcagcttttatggccatctatgtcactcctctttataattaattaactcttctaaattttctttgtaattggacaagatcatttctaacactaccatctaatacagttgtgccgactttaactctaaatccaccaattaaatctggattaatttttgtatctacaataactttagataacttcgtttgttgagttactagtttgacaatcttatctaactcttcttgactcaattcatatgttgactcaattgttgcaaaatcttgattgtagtgtccgttatataagctttggaacgccttgaatacgtcagctattaatgagatatgtctattatctgctaacacgtacatcatatttttaatgtatggattaatgtcagtaaatacaccattaatcaactcacgacgttgttctgctgtttgagttggattactgtcaaccattttcaattgctcaattttatcttttactgcttcatttataactgttaattcttcattaatagtctctaaattatttgtatctaatgacacgtcaaataatgctttagcatacttgttagctacttttaccattatttatcgcctgcctcttttagatacttgtcaaccaatgctttttggtcttgttcagaaatttcttttctaagaactttagaagcaattaacactgatagttcagatacttgattattaatatctgcaatggcacgttctttttggctattgatttcactttgtgctgtttcaatcataccgtttgcacgtacgtttgcttcatgaataatttgttcttgctgttgacgtgcttgaaccttagcatcttctaaaatcttttgaacttcttcttgtgtttctttaagtttttgtttattttcttcttcaagtttctgtgcatttaacttagcttgttctgcgtcatcgatatctctgttaatatctctttcacgtttatccattacatctttcaatggaccccatgcgaactttttaagtaacgcaagtaacacgatgaaagttaggacctgtacaatcacagtaccccactcaacgcctccagctgcaccaagaacgaataagttagctgtttcagtcacgggttcatgacactcctttcattaaaataatcgctagtgttatatagaaaaaaacgacgaggttaggacctactgaatttatgcgataggcatggtgcattcatatctcaactatttaataaagttcaaagatattactatatatgcatcatgaattatgtcctatgcgctttgtcccgacctcttttatctgttaattatccagcaaatgtcatgaatgcaattactacaccgatgataggtaatgcctcaactaaacctacaccaatgaacatgatacccattaattgaccacgtgcttctggttgacgtgctacaccttcaactgttcttgaaacgattaaaccgttaccgatacctgctcctaatgctgataaaccaattgcgattgctgctgcgattaaattcataatttaatttcctcctgtgattgtatataattattgaaatttttagtgttcatctgccactttatgtgacatataaaccatcgaaagcataataaagatatatgcttggattgttcctacaaatattgaaaatgcttgccaaacaattaatcctgggatactaataatccaaccccatgctggttcgttaaagaataagccagcaagtaatgttaatagtatctcacctgcaaatatgttaccgtacaaacgcagaccaagcgttaatgttgaagtgaactcttcaaaaacattaataattgccaatggccaaaacggctgtacataacctttaagatattgtttcgtaccacgcattttaattccataaaagtgagttaacagtattatcgttgtagacaacgttaaagtcactgttgcatcagctgtcggtgatttccaccacaatgtgtgatctttcgttactatagaaaacggaagacctaacatattagctataaaaatgtacagaatcagcgttactgctaagaagtggaattgaccaccttttttccaagccatgttaccttcaatgattcccctcacgaaatcaaaaatccattcaacgaaattttgtttgccagttggtctttttttcaaattacgcgtacaaatgatagcaagtagaaaaacaagaaacgccgtaacaagtatcatcaatatacttgataaattgaaaacgatatcaaaaccgaataaattccaactcacgagcggggatttgtgatccataatctcacctctttcttaatttatttgctcacctttagtaaaggacgtatgataactacaacatatgaaatcattaaaccaataattataccgatgatacttacatgcgctttattaaggtaccaaatcatacaggcaataattgcaactaagtatcgccacatatttccagttgaaatatgcatagtgtctggtcttttagctttagctaaatagcattcaaaaatacatgtgttgattgcagaaccagtaacaccaatgattaatcctaagataaatgcatggtgtgtataaaggtataatcctcccaatattattattagataaaaataatattgaatgaactgtttaaaaatgttgtagaaacgactcattttatatgcctccgtgtgactgatatcaatcatgaaaaccgttccactcatacaaactaaatgataatataggcgatttgtggtgtcaattctattcaaattgttgtaaaaaaataagcatagttagacacaatttagacacaattagacaaaaagcctattttcctcagaaatcgcttggtttttcagtgattaaattcaaataatacttaatatgattaactattctttctgaagcaaatccatcaccgtaaggattagatgcttcagacatttgatgatataatctctcatcatcgattaattcttttgcagcttgatacacattttgcttatttgttccaatgacttttaatgtgccagcttcaacaccttcaggacgttctgtaacgcttcgcaaaactaaaactggcttattaaatgatggcgcttcttcctgaattccacctgaatctgtcaaaataaaataagattttttagcaaaattatggaaatctactacgtctaaaggttcaatcaattcaattctgtcatgactacctaaaatcttttgagccacctctcgaactttcgggtttttatgcattggatataccagtgctaaatcagtatactcatctattaagcgtctaaccgctttaaatatattttccatgggtttcccgatattttctcgtcggtgtgctgtcataagaatgaattttttgtcatggtatttatccatgatgttagatttataattgtcatcaactgtatatttcatagcatcaatcgcagtattaccagtgacaacaacactttctgaatatttcccttcacttaacaaatgcgatgcagcatttttagtaggtgcaaaatgtaagtcagctaatacaccaactaattgtctattcacctcttctggaaaaggtgaatatttatcataacttctaagccctgcttcaacgtgtccaatcggcacttggttataaaatgccgctaaaccacctgcaaatgtcgtcatcgtatcaccatgtacaagtaccatgtctggtttttctaattgaatcacttgttctaattgagtgattgatttagaagttatctcagaaagtgtctgtcctgatttcataatattcaaatcgtattttggtttgatttcaaaggtacttaatactgaatcaagcatttctctatgctgtgctgtaacaacaacaattggctcgagcattttttcttgttccaaagctttaactaaaggagccatctttatggcttcgggtcttgttccaaatatggtcataatctttttcatcaaactacttatctccgattcttctatttagtaccaaacaatctatctccagcgtcgcctaaccctggtgtgatatatgctttatcatttagcttttcatcaagtgcagcaatataaatatctacatccggatgtgcttcatgcatcttttctacgccttctggtgctgcaattaaacacatgaagcgaatatttttagcgccacgtttcttcaatgaagtaatagcttcaattgctgatgcgcctgttgctaacataggatcaacaacaatgatttgtctttcagtaatatcttgaggtaacttagcaaaatactctacagcctttaatgtttcgggatctcgatataaaccgatatgtccaactctggctgcaggtactaaacttaaaataccatcagtcatacctaaaccagctcttaaaattggaacgatagctaattttttaccagctaatcgtttagccgtcattttagttacaggcgtttcaatatcaacatcctgaagctctaagtctctagttacttcatatgccatcaacataccaacttcgtctacaagttctctaaattctttagtacctgtatttacatctctaatatagcttagtttgtgttgaattaatggatgatcgaaaacgtgtactttactcataaaaattactcctatctttgtgtatgtttattgatatagaggatattcagctgttaatttcgcaacgcgttctttagcttgttgtaatttttcttcatctttactatttttcaatgctaaactgatgatttttgcaacttcctcaaaagctttttcatcaaatccacgcgttgttgcagcaggtgtacctaaacgtataccactcgttacaaaaggtttttcttgatcgaacggaatggtatttttgttacatgtgataccaactgaatctaaagtctcttcagcttctttaccagtaagtcctatagacccttttacatcaacagctactaagtgattatctgtaccgccagaaacaattctaaatccttcattaattaatgcttctgcaagaacttttgcgtttttaaccacttgttgttgatacgttttgaaattattttctaacgcttctccaaaagcaactgcttttgctgcaataacatgctcaagaggtccaccttgaataccagggaaaattgttttatctatgtcttttttatattcttccttacataaaatcataccaccacgtggtccgcgtaatgttttgtgtgttgtagttgttacaaaatcagcatattctactggatttggatgtaaacctgccgctactaatcctgcaatatgtgccatgtctaccattaacttagcgtttacttcatctgcgatttctttaaactttttgaagtcaattgttcttgaatatgctgatgctcctgtcacaataagcttaggcttatgctctaacgctaatttatgaacttcatcataattgattcgttctgtgtctttatctactccatattcaacgaaattgtagaatttaccactaaaattaacaggcgctccatgtgtcaagtgaccaccatgactcaaattcatacctaaaactgtgtcgcccatttctaatgcaactaagtaaacagccatgttcgcttgtgaacctgaatgtggttgaacattgacatgttcagctccaaacaatgctttagcacgatcaattgcgatgctttcagtaacatctacaaactcacagccaccataatatcggcgtcctggatagccttcagcatacttattagtcaacactgaaccttgtgcttccataaccgcttccgatacaaaattttccgatgcgattaactctatgttgctattttgtctctgaaattctctctcgattgcttctgcgataactttatcttgcttggtgatataagacataaaatctccccttctttcaaaaaaacttattggtatttagcacgttcgccaccaatctttttcggcctagatgtggcaatagttacaattgcctgtcctacttgctttactgaggtccttacaggtacacatacatgtttaatatgcatgcctattaatgtttgaccaatatcaattccacaaggaacagtaatatgttcgaccacgatcggatccttcatatgctgaaaagcgtatgttgccaaactccctccagcatgtacatctggaacgacggaaacttcttccattgttaatggattatactgagatttttctattgttatcgctctgttgatatgttcacatccttgaaaagcaaaagtaacgcctgtctctttactcacaacatctaatgcattaaaaatagtttctgcaacttccatcgaaccgacagtccctattttttcgccaatgacttccgatgttgaacatccaattaaacatatatctcctttattaaaaaaggacatatcttttaattcgtctaataacattgtcaaatctttcataaaagcccacccttcctaaaaataaaaaaggaatatagcaaagtgctacactcctctattataacttatttaactgttaacatatactaattatacagaattcctactagcaaataatatcttttaattttaaaattaaacttacaagttcttcataggtatgtacatacatttcttttgttccaccgtatggatctataacttctcctacttcttttacatattcatgcaatgtgaaaacatgattttgcaaaccaaagtgtgcctctattaattctttgtgcgaatacgacatcgtcaaaataatatctgctttcaaatctgcttcagtaaattgttgcgataaggtcgtttcagctaaatgatgttcttcaactaagtcttcaacataattcgaaacaccttgattgttcacagcgaatatacctcttgattcaaattgatgatttggcataacctcttttgcaatactttccgctaatgggctacgacatgtgttacctgtacaaacgaataaaatcttcatagttcacatcctttaataatgtgattacctgcagcttttaacatgcgattcataattgcttctgtattatcattcagctcaaagccgtatatatacgccgctgaaatattttcattttcatcaagtgaatgtaacacatcataaagattatgacttgcttgtttaacatcattgtcatcctgacataattgaatgaattgcgcttcacttggtataaacgccatcttattactcggcacaataaaagctatagaagaccaatctttaccgtcatttccaattttgctctcaatatctgtaataattgtaagtggtgtattgggtgagtaatgcttatacttcatacctggtgcaattggctgttcagtatcattataatcagcatgggcgatactattcggaagtatttctgtaatcattgctgctgttatagaaccaggtcttgcaattttataaggaaaagatgtgcaatctaaaaccgtactttctaatccttcttcactttgttcagcttgaacaataccatcgatacggccattcaaatcttgatatacatgattgaaagttgttggtgaaggtctaccacttaaattagcacttggagcagctagaggttcatttatgatttgtaataattgtctacctacagaatggcttggcattctaacagcaactgatgataaacctccagaaacttttcgacatagatagcctggctttaacggcaatataaacgaaatagggcccggccagaatgcctgcattaacttttctacgcgtggatccaaagtatatgtaaaatcttttaattgacctttactgtgtatatgaacaataagcggattgtcagatggacggcctttagcttcatatattttagctacagcttcttcatctgtcgcatttgctgcaagtccataaactgtttcagttggtaaacctattaaaccaccgtttaaaacaatgtcttttatttcattaattttaggatattgctgtaaatcttcattatattctctaacatcccaaattttagtatccaacttaatcacgcctttcttatttatcataatataaagcaaaaagctatgcacttaactaatcatagcaaaggcataacttctaattaccatttaaatgagacgattcgatcgtggccatttatatctttaataatgtcgatttttttgtcaggaaatttatttaaaattattgatttaagtgcctcaccttgattgtaaccaatttcaaaaacaactgggctgcctttttccataacgtgaggtaaatcttcaatgattgattcataaatagcatatccatggttatctgcaaacaatgcctgatgtggttcgaatctcgtaaccgttggagacatcgtaaccatatctttttcatctatatatggtggattagatatcaagccgttcaacttgataccttcattaattaagggctttaatgcatcccctgttaaaaattgtatttgtgattgatgcttctcagcattattacgagccatattcattgcttcaagtgaaatatcagtagcaataacatttaaatccggcttttcacatttcaaagtaattgcaagtacaccactacccgttccgatatctacgattgttgcatcatcttctaactgttgtaagaaatgcaacattacttcttcagtttcaggtcttggtatcaaacaatttgagtttacatcaaacgttctaccataaaatgaggcaaagccaactatatactgtataggctctcctaataacatacgttgtaatgctaagtcgaacttcataatcatcgctttcggcatatcatcatgcatgtggactacaaagtccgtacgcgtccattgaaatacatctaacattaaccattcggctcgtgtttgttcaaaccctttttgttgtgttaaatgaattgcttcatctaacttttctttataattcaccattattaagttctttcaatttatctgtctgctctgataaagtcagtgcatctataatttcttctaaatggccttccataatttgccctaatttttgaagcgttagacctatacgatggtctgttacacggctttgtggataattataagttcgaatacgttctgaacgatcaccagtaccgactgctgatttacgttgtgacgcatacttttgttgttcttcttgaactttcatatcgtataaacgtgcttttaacactttcattgctttttcacggttttgaatttgagacttctcagaagatgttgcaatgacaccagttggtaaatgggtaatacgtactgcagagtcagttgtgtttacgtgctgaccacctgcaccacttgaacgatacgtgtcgatttttaaatcttcatttctaatttcaatttctacatcttcaacttctggtaaaactgccactgtagctgttgaagtatgaatacgtccacctgattctgtttcaggcacacgttgaacgcggtgcgcaccattttcaaatttcaatttactatacgcgccattaccagaaactgagaaactaatttctttgtaaccaccatggtcactttcagacgcttctactatttcagttttgaatccttgtgattcagcatactttgaatacatacgcattaaatcaccagcaaaaatcgcagcctcatcaccacctgctgctgctcttatttctacaataacgtctttgtcatcattaggatctttaggaatcaataatattttaagctcttcttcaagatttggaagttcagctttaataccattactctcctcttttaacatttctacttcttctttatcatcagtctcacttaacatttcttcaatatcagctaattcttcttttttagctttatagttacgataaacatctacagttttttgtaaatcagcttgctctttagaatatttacgtaatttatctgaatcatttacaacatctgggtcacttaacagttcatttaactgttcgtatctttcttctacaatatctaattgatcaaacacttataattcctccttattattatcactaggtgctacgatatggtgcgcgcgacaacgtggctcataactttcattggcacctactaagataatcggatcatcgattttagctggtttaccatttattaatcgttgcgttctactagatgaagaaccacaaacagcacaaactgcttgaagtttcgttacttgttcactgacagccatcaatttaggcattggttcgaacggttcgcccctaaaatccatatctaatccagcaacaataacacggtgtccatctgctgatagtttttctactatacttacaatttcatcgtcaaaaaattgcacttcgtctattcctataacatcaacattagttaagtcgtgcgtcataatttcacttgctttagaaatattaatcgcttcaatggcattaccattatgagagaccactttttctttatgatatcgatcatcaatcgccggtttaaatacaacgactttttgtttagcgtatataccccttcttagacgtcttattagttcttcggatttaccgctaaacatactacctgtaatacattctatccaaccggaatggtaagtttcatacattgagagttccacctttttcaaaacataatcgctttattatatcatatttcaaatattcataaatgtctttttcataattatatcgatattgtacatgaacaattattttataaatttgtcttgcatatttatatacagctattctaatttgttgcttcttattcgtgcggtgtttctactcaatacaaactttaataaagggggaaatttatcattatgtattaacaacatggtattgagtcacttctttgaacacagtcgtaagtatatacccttactacgcttataaataaaaaagctgtctacaattccattataggatgcagacagcttaacgattactatattagttgtttgatttaagaccaaactttttgttgaaacgttccacacgtccatccgcagcagcgaatttttgacgtccagtgtagaatggatgtgaatcagatgaaatatctaaacgaataactgggtattcttttccatcttcccactccatcatttctgaagatgtttttgtagaaccgcttaagaatttgaagtttgtagtagtatctaaaaagattacttggtgatactcaggatgaattccttgtttcattattttcagctcctttgccctgaaccatctggaacagagttatttgtgagtttttacccaatactgtgtaattataaaggtaattaattcaaaacgcaagcccctatataatgtttattaaattataggtcgacccgttttagtactttcttctgcagacttttgtagctgcttgaagaaatcttcattattcttagaccttttaagtttgcgaataaatctttcagtaaagtcagttgagtcagtgaatagatttcttaattgccataatgtgtctaattcagatttacttatcaacaattcttctttacgcgttgaacttctgccaatatcaattgcagggaagatacgacgttcagacaatttacgatctaaatgtaactccatgttacctgttcctttaaattcttcgtaaatcatatcgtccatacgtgaacccgtatcaactaatgcagttgcaagtattgttaaacttccacccgcttcaatatttctcgctgcaccgaagaatgcttttggtttgtgtaaagatgcaggatctaaaccacctgataatgtacgaccacttggtggaataactaagttataagcgcgtgctaatctcgttatagaatccattaaaataatgacatcttccccaatttctactaaacgctttgcacgttcaagtaataattcagctactttaacatggtgttctggtggttcgtcaaacgttgaatgaacgacttcagcagcttctactgagcgttctaaatctgttacctcttcaggacgctcgccaactaacaaaataaatagctttgcatctggtttgttcgtactgattgcattcgctatttcttttaataacgatgttttacctgctttaggtggcgccactattaaaccacgttgacctaaaccaatcggtgttactaaatccatgatgcgcgttgaataattttgtgtttctgtctctaatttaatacgctcatctggataaagtggtgtcaaagcttggaaatgcggacgtttcttcacttcttctgcgttatggtcattgacaaagtcaacttgtaataagccataatatttttcgttatctttaggttttctaactttcccagttactttatccccacgtttaatttcaaaacgacgaatttggctagcagatatataaatatctttttcccctttagaatagttcactgttcttaaaaaaccataaccatctggttgaatatcatctaagataccttccatataatagttaccatctttttccatttgtgcttccataatagctagaacaagttcttttttatttaatttactatagttcgtcaacttaagagttttagctttttgagtgagttccttggtagtatagttcttgtacaattcgtggaatgattcatactgaggagatgtacgttctctttcaggcatatagtttacacccatttcattattttttagttagtaagtaatagataggcatgacaatgcataaataactgtgctagcacaatcccattatgctaatccccaaccttttaaatacatgaataactatagcaaatttttattttaattacaaaatctatttataaaaattgcaaaattaaaacagtacacaaaacttaattagtcatgtgcactgttttattgcgatttttaattcaaaaatcaaatttatttaaaatatccagctatagatttcacttctaagaactcttcaataccataatcgccccattcacgacctaaaccagattgtttatagccaccaaatggtaaatctggctttctacctgcttcgtttatttctactgtacctgcttcaatagaacgagctactttatgcaatgtttctttgtccttaccaataacatatcctgccaaaccatattttgtatcatttgcaatttgaatcgcttcatctaaatcgttataagtgataactgacattactggcccaaaaatttcttcttgtgctatcgtcatttgattatctacattaataaaaattgtcggacgtgcaaagtatcctttttcaagtccttctggtttaccaggaccaccataaaataattcagcaccttcttcaatacctttattaatataattttgtacttgatcaaattgttttttactaatgatagggcctacttgtgtaccatcttctcttggattaccgacacgcacttggctaaattgttcttttaattcagctaagaatgcatctttaattttgtttggcactaaaacacgtgtaccagctgtacatacttgaccagtattattaacaactttgcctgttgttgctttagccgcttctttaatatctacgtcatctaggacgatatatggtgatttgccaccaagctctaatgatacctttttaaaatctttagcggctttttccataattttagaaccagtagggcctgatcctgtaaatgacatcatgcgtactttaggatgttcagataaaggattcccaacaccagcaccatcaccattaacaaggttaaatacacctttaggaacaccgactttatcaaaaatctcagctaaaataacagctgcaaatggtgtttcttcagatggtttaagtacaactggactaccagccgcaaatgctgctgctaattttaatgatgtttggtttgtagggaagttccacggtgtaattaatccagatacaccgattgcttctttaacaactaaatcatctccgcggcgttcttcaaattcgtagttatctaatgcgtctctcgctgcaacaaaatggtttagtcccatttgataatggacacgctcagataatgataaaggagcacctaattcatccgtaatagcttgtacaatatcgtcttttctgttttcatattcttttacaattttatctaataacgcttgtctttctttcacagatgtatgacggaactctaaataaacatcgtctgccgcctcgacggctttatcaacatcagctttattacctttagcaactttcccgattacttcttcggttgctggatttataacttctatcgtttcattactattactttctacccattcgccattaatgtattgctttgtgtagtctctcattattctttcactcctcaagaatgatttatatattatttatccgaaatgcatacgatataaacattacattccattatgatacgctcccttttaatatgttcaaaataaaatgctttaaaattttgctgcatctatttttttatatttttaaataaaaataactattcccacatcatcgcaaataatgcgaagacttagaaatagttataatcaatgctatgtttaaacgtcatgtaattatttagcagtacgttgatctgttaaatcgacatatgattgcgcccatgcttcaattggatgtaaagcctctgctaacgctttacctttttcagttagcacataaataatttgtactggactcgtagaaatgatttgcttctcaactaactcccattgtgcaagctctgacaacttaagacttaaagcacgtggtgttattgttttcaaatctcttttcatatcggaaaagtgtgctgaacagtcattacatcttgagagataattaatgattaatccattccaacttctaccaagtattttaaaagtttcttcgagatacggacatacttccatcatcttcacctctcatcaataaatttagaatgtaaacgaacacccttttttaatcagtataattattataccacaaaacaagataaatctatacagtttccgtccaaatatctgcacctaaagcttttaagtgttctacaatatctgtataacctctataaatatgttttacattgtaaattgtagttacaccctcagcaattaaaccagcaataattaaacaagctcctgctcttaaatcgctagcataaacttcagcaccatgtaatgttgatggttttatcgttgctgtgccttcgtcaacttcaatatttgcacccatgcgctttaattcttcaacatgtttaaaacgctccggataaatcgtatcagttacaaatgaaggaccatttgccataaataataatggtgtaataggctgttgcaaatcagtagcaaaacctggatatactagtgttttaatatcaacaaattgatatggcgcattattattgatgagaattctttcgtctcttacatcaacattcacacctaattcactaaatttagcagttaatgtttctacatgtttcggaacaatattatttaatataacattttctccacatgctgcagcgatacacatatatgtgcctgcttcaattctatcaggtataacttgatactcagaaccatgtaattctttgacaccattgattttaattgttgatgtacccgctcccttaatattagctcccatacttgttaagaagttagcaacatcaactacttccggttctttagcagcattttcaattacagtttgtcctgttgcataaactgcagctagcataatgttaattgttgcacctacgctaaccatatctagaaaaatatgcgcaccttttaactctttagcttcaattttcattgatgtcgtacttgattcatcaatttcagcacctaaagctttaaatcctttaatatgttgatcaattggacgtggcccaagtggacatcctcccggtaaaccaatcacacattttttaaatctacctaacatggcacccatcatatagtatgaagcacgtaatgattcaactttattatttggtaatgcagcattttgtatttcagttgtatcaacttctaattccgtaccatttagtgatgccttaatatttaaatcttctaataaactcactaaagttttaacatcagagatttgcggtaacccttctaatttcacatgtccttgagctaataatgttgcaggaatgatagctacagcactgtttttcgcgccactgatattaacttccccatttagtgtgcgtccacctcttatttttattacctcttgagccatatcatttatctcctttgtccattactttttaattttttgcattattagcattataaattaattttactttatttgtaaaatagtttattttaatcgttaaaatcttgtctttctattttcgattgattaataacaaatcattcacctttactaatatatgctgttcttccccacttgaccatggtctaaagtctgattattcaactaaatattgacgttgttttgataattatttagttttaattctacgatttgtacgtaaacttttttcataaattgctcattttccttataattatatcacaatcaattttggtatattttaccatttttacgctttcattttaaaatcaaactgttttatttattacttatacgacataaaaaagaagcaaacaccattttgtctgcttcttttaaaattaatatccctacgttattaataacttaaagattaaatattaattatttagcgcggtttgaagtaccgaactctttaattttacctttaactgtttctttgatagcttcacgtgcaggtcctaagtatttacgaggatcgtaaacttctttgtcgttatttaaaacgtcacgaactgcttttgctgaagcgatttggttttcagtgtttacgttaattttagctgtaccaaatggaattgctttttggatatctttagtcgggataccagtaccaccgtgtaatactaatggtaaacctgtagataaaccgatttcttccatttctttaaatcctaattttggttcacctttgtatggaccatgaactgaacctaatgctggcgctaatgcatcaataccagttttttcaactagttcttgacattctttaggatcagcataaatgatgccgtctgctacaacatcatcttcttgtccaccaacagtacctaattcagcttctacagaaacacctttttcatgagcgtattcaacaacttttttagttgttgctacgttttcttcgaatgggctgtgtgaagcatcgatcattactgatgtgaaaccagcatcgatagcttctttacatttttcaaagcttgaaccatggtctaaatggattgctacaggaatagtgatgtttaagtcatgcattaacccttcaaccattttaacaattgtgtagaaaccgctcatgtaacgagcagcaccttcagaaacacctaaaattacaggtgcattttcttcttgtgacgcttctaaaattgcttgagtgaattctaggttattaatattgtattgacctaccgcataaccattttcttttgcatcaattaacatttctttcattgaaactaaaggcatgaaagttcctccttgagtgcttacgcacgtatttttcaaagtaattatatcaaaaaaatagcggcaatgcattgaaatactgcagattaaatgtgtattttttgaaaaatgcgatagttatactaaatgcaaacgtatacatttttatacaatttaagccgttgcataatatgtagtcattaattacaatattttataagtagattggaggataaagatgtcaaaaatcttaaacacacaactaataggtatctttaataggctagaaaaacaatctttagaaattcaaatggccgcccaatgtttaattcaagcaattggtggcgaaggttatgtttatgtaaaaggttatgatgatttacagtttttcgaaagtttcattctacatagtgatgagcgtttaaaatctagccgaaaacttgacgctattaaagactttaaagaaattgactcaactgatcgtgtattattattcgcaccattttataatgatcaagttgcattagatattcaaaaacttatcgacttagatatcgatgtggtcttaataagcaacaaacctaaaacagatgatttccctgatcatctcgtacattttatcgatttatctacaccaagacctatagtctacactgaagattacgataagattgtccaaccacatgcgatggcattgaattatgtatactatgacatttatacacaaatgattgaaatgacaagagacttagaattataaaagtcactattgttatttcataccttgtcactaacataatattaaaaggttcttcatcttttatggtgggaaggtaaaacttcctgctttttttaatacacaaaaagcgcaattgcctctataatttaaagtgaccaaacccaaactaaaggagacaagtgcgcctatgtgtaatgataccttagaattactaagaataaaagatgaaaatataaaatatataaaccaagaaattgacgtcattatcaaaggaaaaaaagcaacagtggttaatgctgtactaacgtataagccttcggcctgttattgttgtggagttaaaaatgaaggacaaattcataaacatggtaagcgtgtttctcgtattactttacttaaaactcaagggtataacacatacctcaacttagctaaacaacgttttaaatgcttagaatgcaatggcacttttactgctaaaacgtcaattgttgatgagtcgtgttttatctcaagatgtgttactcaaaaagttatagaagaagctactaaagttaaaacagagattgatactgcagaagataactgtatctctccatctactgtaagtcgtattagaactaaagcggctaattcattacgaattaaaccctttaattgtttgccagaacacatcgctatggatgaatttaaaagcgttaaaaatgtaactggatcaatgagtttcatttttatagataatgatactcatgatgttatagatattttagaaaatagaactacaagattcttgcgtgcctatttcgagcgattcgatttaaaaaatcgacaacaagttaagacggttactattgacatgtatgaaccctatgtccgattatttcgcgacctatttcctaatgcagctattatttttgacagattccatatcgttcaacatttaaatagagaacttaataagtatcgtgtacaagttatgaatgaataccgtaataaaaaaggacctaattatacaatttttaagaataactggaaagttctattgatggatactagtaaaaccatatttagtaaatacagatggaataaatcttttaaggcttataaacgctcatctgacattgtagaattcatgctttcaaaagacgatatactacgacactcctacgaacttgtccaaggattacgaaaagacctaaggttatgtaattggcctaaatttattaatcgtttaaattcagttagtaaaaagtctgtgagtaagggtgtatggaaagtggttaaatattatagaaaacatcaaaggatgttaagaaatacaatttattacccagcatttaataatggtgctatagaaggaattaataataagataaaattaatcaagcgaatttcttttggttacagaaatttcaataactttaaagcacgtataatgatgattttcagcttgtacaaaggagaaaaaaagaagacaaccaagcccaataatggactggccgcctaataataaaaactctaaaagttgtattttaaaaatagttctttaaattatatacccaccacatttggtggagaacctattaaaattatacgaaaaaccggtactttcaatgtttaacaatgaaagtaccggttttattagcaaatttatttattttgttgatattttaatgaagcttcaataaatgatttaaaaatcgggtgcggacgatttggtctagataagaattctgggtggaattgacaagcaataaagaaatcatttgtcggaatctctaccatttctactaaacgtccatctggacttgtaccagaaattaccataccatttgcctctaattgttctctatagtcattattaaattcataacgatgacgatgtctttcttcaatttccgctttaccataaacatcttgtgccaatgtgccttctttaattgaacatggatataagcctaagcgtaatgtaccacctaaatcttcgatatctttttgttctggtaataaatctataattgggtatggtgttgctgggtctaattcagctgaatgtgcgccttcaaggcctaatacgtttcttgaaaattcaactgttgcaagttgcattcctaaacaaataccaaagaatggtacattgttttctctagcatacttaattgcactaattttaccttcacttgcacggaaaccaaatccacctggtactaaaataccgtcgacatctgcaaggtattcggctgcattttcatctgttacttcacttgaatcaatccatctaatgtcaatatctttggcaaaaggatatccagcatgtttcaatgattcaacaactgataaatatgcatcttgtaagctaacatatttacctactaaaccaattgtaattttaccatctaaattattaacgatatctaacaactgtttccattcatcaagctgtgtttcatatttcgcgtttaattgtaaacgtttaataacgatatcatccatattttgttggcttaattgtaatggaatttcgtataaagagtctgcatcacgacattcaataacactttctttattaatgtcacagaataatgcaattttatcttttaaatcttgtgtcatttcatattcagttcttacaacgattaagtctggttgaatacctaagcctcgtaattctttaacactatgttgtgttggcttcgttttcatttctccagcagctttaatataaggcagtaatgtacagtgaacatacataacattttctctacctaaatcgctacgaatttgacgaatcgcttcaataaacggtaatgactcaatatcacctgttgtaccgccaatttcagtgataacaacgtctgcattcgtactttcccctgcaagtaataaacgttctttaatttcatttgtaatatgcggaataacttgaactgttccgcctaagtaatcaccacgacgttcttttttcaatacgtgtgaatatactttaccggctgtcacatttgaaaacttgtttaaattaatatcaataaatctttcgtaatgtcctaagtctaggtcagtttctgcaccatcatccgttacgaatacttcaccatgttgataaggactcattgtacctgggtcaacatttaagtatggatcgaatttttgaattgttacatttagacctctatcttttaataatctacctagagaagatgctgtaatacccttccctaatgatgaaactacgccacctgttacaaaaataaattttgtcatgtcttgacctcctaattattaaagggaatgcttcctcatcaattgtaaaaatcacgtaaaacataacattaaagcaagctcattcaagttgtttatttgtcgaattcgacaaaattaaattctgtttacttaccgtttccatactgctatgtcactatgtatatcatttacaactttgatttttgcgttatcatttcttgatttactcaattaaataaaaaaacgctccctctcacaaattctgtaaggggagcgtataaattttatacacgtgtcctatttaaaggagcccgaataaaattttatcatctttcaactaaaagtcaaacaaaaaattaatcgttgaagtcttcttcgtcttcaaacacttcttcgtcttcgtctagttcatcttcatcttcttcaatgactatatccgaatgattgatttcttcttcaacctgctcatcttctggatcatttagttcttcttgatcatctgtttgagctggaatatcatcgtcgtcatccatttcatcttcgcccaataattttaagttttgatcttcttcatcatctgcatccagaatatcgaatttttgaatagttggtgcgattttctcttcaatatcatctaccgaataccaatcacgtaatccccataaattttctccaacatttaaaaaacgaccatctgtgtttaaatccgtgtaaaattgtacaacacgattttcaatttcttcgtactcataatcacctaacgctctaaattcatcgatgatatcatataagttcattgtttcgcctttatcattcaataatgtataagccatatcaataaatgatttttcatcaaccatttgttttgtataatcttgaattttcattgcccaatacttcctttcgaaggatataatctaaatttatacgtctgaattcatttatatatagtaacaaaactaaattataaatgacaatatcatatttcgcaatcactgttagtaatttaaatatttttcaaaaacgacataatcatcagtttgttcgatttcaacgaaattactatttagacataatggtttaaaatcattattctctccaaacagaatcatcgtaatcacattaaggttgtcatagttttttcttaagtaagttggcaattgtcgcagcgcacttgaaccaataccattaaagcgatatgatttatccacttcaatagcagcaatgttcatgcgttcaccaatctgctccaatgcgataaagccaaccttttggccatcaatcattaaattaatgatatgtacattggtcacttctgaacgactttcttcttcaagctttaatgacgaaacatgttttgaatctaagtccaagtaatatagtcgttctttgccaattggtccttcttctttagtcgctgtatgcatgaatccagcacgttcgtaaaggttccaagcattgtcattttccgcatctactactagatatagatgattaaaatcaggaaatacaccttgaacatattgcggcaatgacatcattattttcgtgccatatccaaaaccttgatatttttcattaatcgataatgaacgaatataaacgacattttcaggtgtatcataaccttcatgctgatagtaacgatgtaatacaaaaaagcccaccacttcatttttatcgtttattgctacgttagcaatcctatcagcatcattaattgcatcatcaataacttctttaggtaaagatgaatatatttgttgtctttcattcaagtcaaaatcattaattgctgaacgatattgttcatcaaatgcttttaaagtgataccttcaaaacaaagttctttagccatatatttaacccctatctttttatatatgaagcatgaatccccatattattttacctattatttcactacgataccattatttgctctaagttaaataaattacttatttatattttttgaattttaaaattaatgtgctactcctcattacttatcattttaatcagagacttacaaatacactgcgtacgaactacttttaatattgcgtcactaactaacaatcctatacaacttcaaaattcctagaaaataatatatataacttaacgtctacgtttgtaatacattaattgcgatacgcttacaatgttgaaatacaatggcatcaaatttgttaataattactattattacttgttttttagtcattttactatactattatttaaggatagacattaataatgaggtgggaatcttatgaaagttggcattgacgctggcggtacactaattaaaatcgttcaagagcaagataaccaacgtacttttaaaactgaattaactaaaaatattgatcaagttgtggaatggttaaaccaacagcaaattgaaaaattatgcttaactggaggtaatgcaggtgtcattgctgaaaacatcaacattcctgcacaaatttttgtagagtttgatgctgcatctcaaggactaggtattttgttaaaagagcaaggccatgacttagcagattatatttttgcaaatgttggtaccggtacgtcactacattatttcgacggccaatcacaacgtcgtgtaggcggtatcggtacaggtggaggcatgattcaaggactcggttatttactaagtcaaatcactgattataaacagttaactgacatggcacaacacggtgatcgtaacactatcgatttaaaggttagacatatttataaagataccgaaccacccattcccggtgatttaacagcagctaattttggtcatgtactacatcatttagatgctgattttacacctagcaataaattagcagccgttattggtgtcgttggcgaagttgttacgacaatggccattactgttgcacgtgaatttaaaactgaaaatatcgtttatatcggttcttcatttcataataacgctttattacgcaaagttgtggaagattatactgtgttacgcggttgcaaaccgtactatgttgaaaacggcgcattttcaggtgctattggtgcattatatttagaaaaatagaaaaagaccatttatatgcgcgttgttttaaataaacgctatataaatggccttttattttatggtctaagtgttttgaatacgtattgttccatttattatcacttaattaattacaactcaattcaattaaaatgtaagttcattagacaatttttgcgctgaaacaattgtaccaaccacgccagtttttaaatctatcgcaacggctttatgatcatctctaagttcatctagccattctccgaaaacagaaccttcaatcgtaattaaatcacactcttcaaaatcttcatctcgaacttttaacgctctgtttttaatactccatacaggcataatatgcggctttttttcgtcgctatcattttcactaatgagaataaactgcttactaccttttttagttaagccgtatacttcatcatattttgctacatcttggacaaattctttgattctaattttatctaattccgtcatcacttcttgtgtaacagctacaacgtttagtagatgcccttcttcttccattgtttgattcataataatatggtcttgttcatcaaacaattcatctaattcataagtagcaaaacgatcaacgtccatttttacaactttatcaaatggaatatcacgacttgttaaaaatgatacggccacactttcttctgtccaaacgcctacatacgcttcacttttataatttaggcgtactagttttttatttttagaggcgaaataaatacattcatttattaatatatctctaaagaatggatatgctttataagacatgcttgaccctcactttttaaaatatgtcatacataaaatagtaaatgactccaacaagttagtcaattagacatattatgaattcaatttaatgtcatgtttttcattttaaaaattcaatagcattaaattttacgtatacacaaattcggtctataacacgaaacatatctagttactaaaaatttcaaaacgataacctttagtatacctttatcaacaaaatggcaactcttataacatagtgaaataaaagtcgccatttaatattagtaatacaaagtattgccatatcataaatttaattactgttgactagaatcgaaaaaagcttgttgcaaacgcatattcagtcaactactggcaacacaacattgtagcgccttatgttccgaactctaatagtgttcaagttcagctaaaaatgcgcgttcattctccagtactgtttcttttgaatcaccatgccaaatacagccaaaccttgatttaactttatcttcaccgtaccaatcaccatcataataagataacgggtataaactaccttctttgacatatttcaaaatcgtattgaagaaatgtgtgttatcaccttttgaatgataactataaaacttttgatatcctgaattcaactcgttagcaagtaataacatgctcgttgaaccattttgtctaaagtttaaatcaatcgcataaacgttatcatcctcatcgacgagtaggtcaaaaccagctacaccaaagaatccttgattcacaccgttttccataatttgtctacctgcttctataacgtgctctggtacattagtagtattttcatttccgttataaaatccgtacttatccgttaattgcgttgccgcaccaagatattgaatgcctagcgattccgagtatgcaaactgaacgcaataattcgctttttcttcaatcttctgttcgataataagcgaattcgtttcagcagttgcctctttaatacgcgttatcgctttttgtaaatctgcatcatgataacaaatcataacgccatagccacctgctgtcggaagatcatctcccggcttaattactaacgggaattcccaattcttaatctcgttttcgaattgctcaatttttacaacttttctttttggtaaaaacttcccatttgtccattcaggtattcttgctttattatttaaagcaacaaataacgttttatctaatgcataaaattgctgattcaagattgtttcatcatgaatatattgaaaataaatctttttattttccttatgtgccaattgtttgatcaagttttcgtaagattgctgattgttaaatgtataaattgagttcggtacttccttaccaataacttgaaatagctgatgcaatttgtctgtcgcactagcttcgtgaacaataacaggtaattgatttgctattaataactccctaccagttaaaaaattagattgatgttcgtccggtttcaaccatggattcgatatatacgaaggtcttgacgtatagacaacatctttgtcatataaatcacttaacgttaagttcggctcattaccattatttgtcattacttcccattccctttcaaatgcgcatgctcttcaataatgtcttgataaacgtcttgatttgtaattaactctaaccccatcaacgccattattttagcacctttaattaatgcttcatcaccatgtacactcgcagccgcttctctaaatctatgcgtatgtcctactaaattacgtgatcctattttaatatgaggatgtattgttggcacaacatgacttacgttccctgtatccgtagagccataaccaaaatcatcatcaataactgcttcaccaacttcttcagcatatttagcaaataaatcatctaatttcggcgttttaatgaattcattcacaccgttttgaattggaccaaattcataatcacaaccagtctgtatcgcagctccacgtgcgatttgatttactttttctgttaatatatccaattctttacgcgtcattgctctagtataaaaacgagcatgtgtatagtctggaataatattagctgctttcccgccatctaaaatcacaccatgcacacgttgatcttttttaatatgttgtcgtagttgtgctacaccattaaaataactaatcatagcgtctaatgcatttaacgcttcatctgcattttcagaggcatgagcactttttccgtaaaatttaacatctaaaacatccactgccaaagtatcaatcgttttataagtttcatttcccggatgaatcattaaggcaatgtctatttgatcaatcacaccagccttgacataagaagctttagcgctaccattttccccaccttcttcagctggacatccaagaacgactactttaccaccaatttggtcaatcacttgcttcaaaccaattgcaccaagcacacttgcagttccaatgatattatgaccacaagcatgacccaatcctggcaaagcatcgtattctgctaaaaaacctatagctggcccgtcaagacctgaatcatatgtcgctataaacccagttgcatgcccagcaatctcggtttcaatttcaaaatcgtgctctttcaaacgatctattaaagttcgagacgcaaatatttcttcattaccaagttcaggacgttcatgaattctatgactgatttcgatataactatatttatttgtttctatataatcgagaatttgttgtttttcactcattttttactatctcccttttaccctacactcattttaatcatccacaatattttgttctttcaaaatgaattattacttattctatcggttttatctcatgatgtcatctagtttttctttatttacaaaattttctaataactaaaagcctttcataaatttataaaacagtttcaaattgtaaaacataagccctattgttacaatttaagtattgttagaaacacaacttacaacaaacttaagttttataatgcaacaaatcataagcgttttatagttttgagtagttaataggaggaaattcaaaatgacaaaaatgaatgttgaaagtttcaatttagatcatactaaagtggttgccccatttattagattagcgggaacgatggaaggattaaacggagatgtcattcacaaatacgacattcgtttcaaacaaccaaacaaagaacatatggatatgccaggactacattcattagaacatttaatggctgaaaatattagaaatcatagtgacaaagtcgttgatttaagtcctatgggttgccaaactggtttctatgtatcatttattaatcatgataattatgatgatgtattaaatattgttgaagcaactttaaatgatgtgctaaatgctactgaagtgcctgcttgtaatgaagtacaatgtggctgggcagcaagtcattcattagaaggtgctaaaactatcgctcaagcatttctagacaaacgaaacgaatggcatgatgttttcggtacaggaaaataaatcttagtcaatcaagttaatcagaaaagcagtcgaacaatgatgttacaaccgccattgtccaactgctttttattatgcttcaaagtcaaaaaatcgaacaaatgaaaaagtaaaatctttaacatttgtccgatttatttgagaaccactataatttcttaattagtcccattaacacgaactgcataggtaaccttaaatatagttgccatgttggcaattgtttatctcctaaaggtaactttttaactgccatatagatattagctgggaatacagctagcaagaatagattgattgtatttttcaagcattgagatggtcttttaattaaaagtgcaagtccaaataatatctcaaagattcctgtaacaagaaccgctgtttttcgaagtggcaaacatttcggtatgatatttctaaattgtcgttctcgtgtaaaatgcaatacacctattacactaaaacctattcctaataaatatcttagtatgttcaatcagcttcaactcctattctgtaatgattttatgaattaatgtaggcgatacaacatgatcagcaattgttatgcttgaatctaattttttaacaacatcgtctacatcttggcgattactgtgaatcgttaataatgattctccttcttctactttatcaccaatttttttatttaaaacaataccaaccgctaaatcaatatcatcctcttttgttaaacgtcccgctcctaacatcatcgaagcgacacctatatcattagagactaattcagtcacataacctgattttttagctttatattcaatttgatattgagcttgtggcaaacgctctggatggtcaataacagtttcgtcgccaccttggtttttaataaatgttttgaatttttctaatgctgcacctgaattaattgcctcaattagcaacgctctcgcttcttcaagcgtttcagctttgtttgcaagtacaaccatttgagaacctaatgttaatacaagttctgttaaatctttcggaccttgtcctttcaacgtatcaattgcttcttgtaactcaagcgcattgccaatcgcacgtccaagtggctgattcatatcagaaataatcgccatcgtattacgtcccacattattaccaatacgtaccattgcgtgcgctaatgcttcagcatcttctaatgttttcataaatgcaccgctaccagtttttacatctaatacaattgcatctgcaccagcagcaatctttttactcataattgaagaggcaattaatggtattgaattgacagtaccagtaacatcccttaaggcatataattttttgtctgcaggagttaaatttcctgattgtcctacaactgccactttattttcattaaccaatttcacaaatgttgcttcatctatttcaacatgaaaaccatcaattgcttctaatttatcaatcgtaccacctgtatgacctaatccacgcccactcatttttgcaacaggaacatctacagctgctactaatggtgctaaaaccaatgtagttgtatctcctacaccacctgttgagtgcttatctactttgacacctttaatatcactcaaatctatcatatcaccagaattaaccatagccatcgttaatgctgcacgctcatcatcattcatatcttggaaataaatcgccattgctaaacttgatgcttggtaatcaggaatatcccctttaacatagccgtcaataaagaaattaatttcttccgttgttagtgtatgaccgtcacgctttttctcaataatgtctatcattctcatttttatcatccttttcttaaaaagcttaggacaaagcatctgcgctttctctagtccatttttaaaagcacaagcgaaaattattatagcaagctatcgatttcatttttaatatcacaatttcaatgcgatgttattattcttaaatagattggttataacgtcaaagtccctattaaattatcttagaatcatcatggcatttatgatgtcttaaagctgatatcgacatacttatatatggttacgatgtcccatgcttacatatttttttataaaattagtaatctgaatctgcttctaaaccttgcataatttgaacgcctgcgctcgcaccaatacgtgtcgcacctgcttcaaccattttattgaaatcttctaaattacgtacgccacctgatgcttttacttctatatcagcacctactgtatctttcattaatttaacgtcttctgcagtcgcaccgccacctgcaaaacctgttgaagttttaacgaagtccgcaccagccgcttttgttaattcactcgcttttacaatttcgtcatggtccaacaataccgtctcaataatcacttttactgtgtgacctttcgcagctttaaccactgcttcaatgtcttgttgtacatcatcaaaacgcccatcttttaatgcgccgatgttgatgaccatgtcaatttcatctgcaccattttgaattgcatcttctgtttcaaatgctttcgttgcagttgtcgacgcacctaatgggaatcctattaccgtacaaactagcacctctgaatcagctagtcgctctgctgcatattttacatgcgttggattcacacatacagatttaaaattgtatgctttcgcttcatcgatgatttgatcgatttgcgtacgtgttgactcaggcttcaataaagtgtgatcaatcaattttgcactattcattttctatctcctcctttatggttgactataaaaatacggttgtaaattagttgtttgagcgtcaggttcatttaaatatcagtttagatgttcgctttttatgtaaccgcatacatatactattacattaattcatttcccataaacaaacaatacaattgaacgtgatatcttcattatgaacgatgacttgacaacaagctaatcaggattatatttttataattctttaattctatagtacaaaaattcgcaaaaaagggaaacaaatgttatcttaaaattattaatgaatattaaggagaagataacaaatgacaaaaggtacaccacatattcaaccaaatggagtaaaaattgctaaaacagtattaatgcctggcgatccgctacgcgcaaaatatattgctgataattttttagaaaatgttgaacaatttaacgatgtacgtaacatgtttggttacactggtacatataaaggtaaagaagtttctgtaatgggttctggtatgggtattccaagtattggtatttactcatatgagttatacaacttctttgatgtagatacaatcattcgtatcggttcttgtggcgcattacaagaaaatgttaacttatacgatgttattattgcacaagctgcatcaactaattcaaattatgtagatcaatacaatattccaggtcatttcgcgcctatcgctgacttcgagttagtaactaaagctaaaaatgtcgctgaccaaatcggtgctactacacacgtaggtaacgtattatcttctgatacattttacaatgccgatccaacattcaatgatgcttggaaaaaaatgggtattttaggtatcgaaatggaatcagctggtttatatttaaatgcgattcatgctggtaaaaaagcacttggtattttcacagtaagtgatcatattttacgtgacgaagctactacacctgaagaacgtcaaaattcatttacacaaatgatggaaatcgctttagaaatcgcagagtaacttatttaaattgactttaattgctctttaacaatgcgattaaactcaaaaagccaacacattctgggcgtatccccatttatgtgttggcttttatttatattattacttatctgtagattagcttaagtaagatttaaacatccaattatgtttatctactgatgtttgcatacctataaacatatcttctgatacatcatcgccagcattaccagcaatttcgattgcgttttctaattgttttgagatatttgtgaagtcttgtgataattcttcaaccatttgttctgcagagtaacctttcgcagcttctttaacaattgattgctctaagcattcagttaatgtacctacagggtttcctcctaccgctaaaattctttcagctaattcgtctacatattggcttgcttcattatataattcttcaaatttaacgtgtaatgagaagaagttaggtcctttcacataccagtggaaattatgtagctttgtgtaagctactgtccagtttgctacttgttgattcaattcttttacaacatcttgttgattactcatatttaatacactccttaaaattgtctacgtcttgcttatttatattaattattatattataatgattctaatctgtaaagtgtttttaccttcttttttataattattctaatctaaatgtaaagtgttccgctttttaaatgcctaaattttaattcatcatctaatatatccattatcaattagcaagtatgttttatcaatcagtaagttttactttcgcattatcatctaaaaagaacgatttttcataatcatttggttggtgccatgttgttttccacattctatttctattattagcaaacattcgataaccgaaattacggactggtttaggtacaaaccataaacctacgcccaataatttagttcgattaggtagtgctgtgattagtttaataatcgcctgcgattcaaaatatatacgatcacctttctgtaaaatcacgctatttttatttgccgcttctggatgttgtttaaaaaattgttgtccaacttcaccttttaacgtggcaaattgataatttcttggtaggtcatgttgaattaaccaaatgacatagttataacaatatatacagtttccatcataatatacgattggcataatttattcgctcctttaatagtacttatagtcatttttcctaatttaaaaacatttaaacaaggttgtcacttgataagtcctcgcgacacgaaattgccataaaatttatttttcagttttatatttattgtataatgtattttttatttactttaaatttctcaatctacagtgtaatcttatttcttattattaacttagcgtttggtcattcgtcttattcaacatacgactggaaaactcatataaagttttaattcagtaacataaattcatttatattcatatactgtctttattatttattaaaataaaaacgagtaatctatcataagctcttaattagctcttatggttgattacccgtcatttttctttatgcggttattcaaatatgcaattatgcaatttttaatcctatccttacttcttttcaaaaactaccatatatcattagtcatgtttgactttgactatacgtgtgtattttaaaaactgctctgaatatttctccttaatttcctctaaactgtcatatgtaatacctacaatatgccaattaggattgaaataatagaaagaatctttttgtcgtgaccatttaatcatattaccgtctttattataacgtggtaatgttacttcatagccttctaacacattaatatacgtttggaaaatgtctgtatctatacgattaaaattatcaataactaaataacttttatcctttttaggcattaattgagtaataaacccttcacgatagtataatgcccctgtttcatttggtaaatacttgccataaagcatatcttctgaaaaatcaggatgacctgttgttataacaggatttgcattcgctttttgcaataagtcattagccgcttttaagccttcttcttttcgatctacaacaagtaaaataaatggctttaacgcttcttctttttcactttcaagcatatctggtttttgaaccatttcaaatggagatttcaatccattattatcgctcatttcaataattgcatcatactgtgcttgtgacatacttgcaatagcctgttttgcattttcttgaaggaaatataagtttttcaatttaggatgcttatttaatgtacttaatgtaatcggtgtaatgtctttctcataagacacttcaatcactgtactatttgttctaccaggaattggtggtttttcatgaatatgctttgatacttctccaattccaacgacagattgatttttcgttcgattataaaaaataatattgtcgccttcttctaactgagtataaaaatgataaccattacgtttaataccgttgtacgtgtgcgtataaatcgtatattggtttccaggttcaaattcttcagtttcagctaaaaagaaataacgcggtatcttaatttcgcctttaccaagaccacttattaaatcaaactcttctgcagtgatttgattgaacaatgtctctttcatattactcatacgaaattccaaagcttcactacgctttaaataatctgctgttaatggtttcaattgttcattaaaacgaaactgtacacgtattttattttgtgcacctgtttcaacactaataatttcaccacatccaagtagtccagtatccgtctgaacttgataaaagatgacttgatctcctactttagcctttttaaacgctctaaatccttgagatgggttaaaatgtgcgcctgattcaaataaagctgtttgtcctactaacggttcattatgattccaacggttatatccacaattcaaccaaaaataattcgtttctgctgtcatcttaatactccttaacctgaataaattttagaaacactatgaattacattcttttagtgtttcttatgcagttggacgcgtatgcgaacaactgtataccctttgttcactgcgattttaatcgcatttcctataacattgtagcgcccaggacattaatttacgtcccagacccttatcgttttcacttctaagtaagtcgaactattttgctttacaacaagtgcgactctaaatacagttggacacacatacgagcaactgtataccttttaatcagttttctatattttatttattatatctgtcttaatgataaaaattgttacaaacagtttaacatatttagctacctattttgcatataaaaaacatgcttgcatacactatgcaataaaaattacaaatttatatatgataccactatgcttgcttatctctatagcgccattgatacacatttttaaatatctatactgccgttagaattttatcatgtcttaattttcattaaatattaattacttcattttatataaaccaacaaaaaccccctcactactatgcaagtgagaggttatgttgatgtgctttattttcatcaatgtcattaacacaatcatatttcttctgttaatgcactgtattatattcaaacgcgctatcgacaattaatttgaagctacaaaggtaccgcataatggcagcacattaattaacaatgcgctaaactttaatgaggcgctgatttgcttgtctttaaaagtcaacatagcactgataattcctaaaatagctactatacgtggaattgtcatgctcggatactgcggtatatgtaagaaagcaccaagacctgctatcacaccacatactaacgcaatatatagaaattgcttcaaatcattcactcctaaattgttattacactattacacatagctaatcatcaatgtgaaatcaccttcaaagacactatccaaatcttcagaagtcaaaataaagtttgtaccagtagtcagtttgaaaatttcaccatcgacaatcatttgcccttcgccttccaacactgtaactaaacagaactctctaggcttcatataatttaacgtgccagaaatttcccatttaaccaatgtaaagaaatcattcgatacaatgtgtgtacacttatggttttcaataatttcgctttcaggcaaaatattaggtaatggtgcattgtactgaataacgtctaaagctttttcaatatttaacggtctatcattatattgattatcttgacgattgaaatcataaagtcgatatgtaatgtctgacgattgcatcgtttcgtatgctagtattcctgaagaaatagtatgtacagttcctgctggaataaaatagaattctccaggtttcactttaatatatctaagtatcgactctatcgttccgcgttgaacatgattcgcaacttcttctctagactctgctaatgtccctataactatttctgcatcttcttctgcatctataatataccaacattcagatttgccatattgcccgttttcatgctcataagcataagaattatcagggtgcacatgaatagaaagtgattctcttgcatccactattttagttagaagcggaaaatctttgcttgggaaatcaccaaacaattcacgatgttctgaccaaatacggtctaatgtttgaccttgatatggtccattaataatctcgctcgtaccatttggatgtgctgacacacaccaacattccccagttgtatcattgtctaattgatatccaaactcacttagacgttgaccgccccataattttgtttttaaaattggttgtaaaaataatggcattgttgcacctccattgtgattaagtaagcaatagaactctgatgttgttgttccattatattttgattttgttctcatttacatcgtattataaacttccacatttcaaattaactattagtgattgtaccatatttactaacattgcagtactgccaattaaagcgcttcacttaaatttacagtactttaacatttttaaaaatttatagcatagagattatatctctcttacatttgtacacatttccctttaaatttactcgctcattataccaattaataaacaactttaatagttgtgccatacattgttcaaattctttgtaaaatgcatagacaatacgtacttattcatacttataattcatcattttcaaaaaaataacgagttacgaaaacgtaacccgcttcaaatcatatttactatccttattaatccttttcaatttcaaattgagttaaagcatctttaatgtcctgctcaccactaataatttgaaactcttggtgattaaaatgattggatgtgacaatttcttttaatactgtcgcaacatcttctctaggaatttcacctttaccatcaaaatattgtgcagcttctatctttccagatcctgctgcatttgtaagtgcccctggatgtaaaattgtataattcaaacctgaacgtcttaaatagtcatcagcgtaatgtttagctattgtatatggctttaaatcaccgctatcatcaaaagcctgacgtctcgaatcatatgttgaaaccatgacatagtgtttaatattagcctctttactcgcaatcattgatttaacagcaccatctaaatcgacaataattgttttatctgcacctgtgttccctccagaacctactgaaaagataactttatcgaatggtttaaacgtctcagttaaagtctctattgaatcattttcaacatcaacaagaattgctttcataccttgtgattttaacgcattaagttgatctgattgcctaacacctgcagtaaatggtacattttcttttgctaattgttgcactagtaacgaacctacaccgccattagcacctataaccaaaatattcatttacaacactctcctatttattattccctatgccataccactttatgagatatgtaaaacttgttacaactataaaaatcaattgacatactactgggaacgtattaaattaatatatgaacaaatattcatatgaaaggattatcatataatgtcagaacaatattcagaaatacatacagatacattagaacgcgtaactgaaattttcaaggcattaggcgattacaatcgaatacgtatcatggaattgttatcagtcagtgaagcaagtgttggtcacatttcacatcaattgaatttatctcaatcaaatgtctcgcaccaattaaaattacttaaaagtgtgcatcttgtgaaagcaaaacgacaaggccaatcaatgatttattcattagatgacatccacgtagcaactatgttaaagcaagccatacatcacgcgaatcatcctaaagaaagtgggttataatatgtctcattcacatcatcatcatgaccatatgcatagtcatgtaactacaaataataagaaagtattgtttatatcgtttttaataatcggtctatatatgtttatcgaaatcatcggcggtctccttgctaacagcttggcattactatctgacggtatccatatgtttagcgacacattctcattaggtgttgcacttgtcgcatttatttatgctgaaaagaatgccacaactacaaaaacatttggttataaacgtttcgaagtactcgcagcgttatttaacggtgtaacgctttttgtaataagtattttgattgtttttgaagcgattaaacgtttctttgttccttctgaagttcaatcaaaagaaatgttaatcattagtattatcggtttaattgtcaatatcgttgttgcattctttatgtttaaaggcggcgacacttcacacaatttaaatatgcgtggagcttttctacatgttatcggagacttattaggttcagttggcgccattactgcagctattttaatttgggcatttggatggacaatcgccgatcctatcgcaagtattttagtttccgttattattttaaaaagtgcttggggtatcacaaaatcttcaattaacattttaatggaaggcacaccaagtgatgttgatatagatgaagttataactactattaaaaaggattcacgaatacaaagtgtgcatgattgccatgtttggacaatttcaaatgatatgaatgcattgagttgtcatgttgttgtagaccatacattgacaatgaaagaatgtgaattattattagaaaacattgagcatgatttattacatttaaatattcaccatatgactattcaattagaaacgcctaatcacaaacatgatgaatcgattatatgttcaggaacacatagtcattcacataaccatcatgctcatcatcacgcgcatgcacattaataattttaacctactgccatttcatcgattaaacttttcaatggcagtaggttttttatgtctttatggcgacttgtttggtctttgatgatgcaatgtttattaacaaattttcaactattatttcttacattagtcatatttttgacaatttactattataattctctaactttagtcactttaattaatttttattagatattaatatgaaaataacgtgttttttgttattgtatttatatgaagaaaaggaggcaccactttgtttacttactttaaatcagcatttaaaaatgctaaaccacaattattaataacattgatatatgcacttatagcatttgctgtaattgcagttgtatatttacttgctaatttccagcttgctaagtatgtacaaactattgcaatttattcacaatttgggcaaaaaccaccagtagatgcatatttaaaagttatcgctgtattacttatagcagctgtagtttcactgtttgttttagttcaaatttttatcggaattacaaatgttatgaaacgagcaatgagtcatgaaaaagtaaaatttaccgatttatttattgcatttaaaaaaggtaattatttaaagagcgttctgatcggtcttgtatctatagcaatgattatcgttctttcacttctgacatcattactatacaaattattttctccagtatcagaaatgattatgaattcagtacaatcatcatatgcagatagtacacacctgattggtattgctattacaactcaaagcatcataatcattgttgttttattgattaaagcaattattacttggttattgttaatacctattttcaactttatgactagtttcgttgaatcaactaacgataaagtaaaaacacacttagctaatggatttaaagcaatgaaaaatggtcaaaaaacatttttcaaatttttcattggaatactattattaaacttaattattattttatttaaaacacctgttggttacttgatttcatttaatacgcaatcactctctcagagtgttgcagaaaatatcataagagtttatacagtaatgacaattattttattcgttgttattcatgcaatcattttaatgggtatcgttcaatattacttaaaacgtggtcaaaaaattactaaagataaagtaaaaacagctgacaagaataaaaaagttgtcactgaaccaaaaaatacaaaagtagaaaatgataaagagacaacatctgttgaaacaaaaacagaaaaagcacaagattcattaaatgataatacaacaaaaacaatgacttcagataaaccagaagacaatcaaccaaaataaattttagagccccttacaactttagttgttaggggctcttatgcatgcgcttagcgcaggcgctcctacttttcaactttagttgttaggggcttctttctaaaataactaagtgaattatctatatatgaagaggtctccaatactttttatataattcgtgattacattctatacttttaattgtattttctgctgtatggaaagttggttttattaattctgattatgttcagaactacaattcataagaaaaatgtgttaaaatatatttgtagtaagtagaagcaaaagatgaaaatctttaactcttgaaacacaaaaagggcaacactcggaaacatgttaccctaatgagcccgttaaaaagacggtgaccttatattttatttaaaaatagccttcaaaatgccggtcaaagcgaatagaaggttattttttatggtcttgagtactaatcaatactaaaccaatgattgttaatacaaccatcagcatttcaaaatcagacatgctagtcctttctaggagtaacaactataaccataggcatcacccctttattaagagattagccaccatctatccaacttgctcaataaatattataacatgcacacttttaaacagtaattcatagtataagttttttcatttcttaatcaactcgataaacagttgagtgacatacccttgtctaactagctatttcttcccctgttatcgtttgttcatcatataaaaatttaatttctcattttttattctctgataaagaagagcaccaaccttttcggctgatatgctcccttcaaaatagacattgaaaaatgaaaactttgaaagagaaatcgtcagtctattattgataagtattatcctatcctcgaaaaattactttcagacactagtgaacaaaaattttactataagcgtatactttggcaatattcgaaggaaaaacatggattaacctgtgcatattatacatttagagcttatatacttaaacatgatgaatttactccttatattatgaaatgttatcaatagatgtcgcctaaagatacaacaagattcgagacaaaacctgatcatcaagcacagtttgactggaaagaaagcattaactttaaaacgaaagataatcaaaggattccactatatataggtgtgctactactttattattctcgttttataatcatgcataacaatgagtaaatcaagtgatgccttatttaattcattaacacaatcgtttgagctaatagaaggtgtatataatgaacttgtaacggataacttgaaaatagtcatgtataagccaagaaaagaaagtacaagtggtcgaataaatcgtagatttaaataattcgctgatggttttaaatttcaagtaaaaccttgtatttccggcctccctagaaaaagataaagttgaatcaataacaaaaatattagatgaaattaatgcttaccaagacgaattgcatttggaagagattcctaagtttttttaatcttaatgaacgatttaactactaagttcatactagtacaggtaaattgcctattactgcctaagagaaagaaaaaattttcttacaaccactacagaatgtgaatgtaaaaaactcatataaagtgaaacatatcttacttatggaatgaaatgtttgattatcccaaaatcacaaatgcgattttggagttgttagggctctaacgcaaatacacccctacttaaaataacggtagttgttatagtatacttaaatgcataaaccatataaaaggtgatgctaatatgacatacggttcaattgtagctatactctgtgccctatttgtgattttcttcattccatatatggagaagaaagacaaaaagaagaaataacactagtatctggattactagcatacaaaggagcagtaagacattttctaatagaaaataactttactgctcctttgtaaattactcttcaactattgtaaattaaataataaataactgccgatgttattaatcagctaaaaaatgctttgctaaatattttgctgcgccatcctcttcattcgtgtatgccgttacatctgaagttaatgcttggatttcagggcgtgcatttttcatagcaactgtataatgaccaaattcaaacattgctctatcattgtcgctatctccaataactaacgtttcatcttgatgaataccaaaatgtgcaatcatttctttaatgcctgtacctttatcagtttgataagccattgtttccgcattaaatcttgatgaatttgaaacactaatctgtagttgcacatgattttgctttaattcatctctaaatgttgttattttttctaaattagaactgaatagataaatttttgaatattcaccttcaggaaacttagttacccaatctatcttaccagcaagcgcatcttgtcttgaagaccattcactatgacttacgccattaataggatcttgactacgaatcatatctcgcatccatgtttcatcttcttttaaagaaactctattaccttcaaaaggaaatacctcataataaatttgttggcgcttagctaaattagtaatttgttgcacttgagccaatgataaaccatgcttgaagataatttctccatctacttctccaattgttccatttgaactaatgatgccatttaccgcaaaatcttgaggtacaagttgatgtatttcagaatgcgaacgtcctgttgccaaaaatactttatatcctttctctctcaattgattaatgacatctttcgtatacgttgatgcttgattattttcatgtaaaattgttccatccatgtccaaaaatattgcttttacgttatccatattgccctccactgtccattttatcttaattaaattttgtcattattagttagtatttgcaaaatatttactctaacattgccatagaaaatcgattattccatctttgaactgctacatttttctggaaaaatcgtgacatgttttcagatgtcaaaatatcatctattaatccttgttgtacacttttcccatcttttaatagcaaaattttagtaaagttactagtaatttcttcaataaagtgcgtcacataaatcatcgcaagcgttggatatgattctgacaatgagtcaagtatacttaacaacgattctcgtgcaataaagtctaaaccagctgctggctcatctaaaattaaaacctggggttgccccattaaagctcgtgcaatcatcactcgttgtttttcacctgtagataaataaccaatatattgttgcgctttagcagacattccaactaatttaagtaattgatgtgcttcattacgtatctcatcatcaatatcttgataaacaccaattgatttaaaggcaccgcttatcaccacatcgattactctttcaccctcttgaaacttttccagtaaactatgagatacaaaacctatatgttgtcgtacagtttctgcagaataccctaccttgcctggcattttaccaaatagattaacatcgccagttgtcgcaggctcatatgcatttaatatatttaatagcgttgtcttaccagcaccatttaaaccatatagaatccatttgtcacctccattaatttgccaagaaatattttttaaaattgtttttccttgcttcattcgcccaacttgatctaattgaattaacatgcgaggtcacccctttattgctactctaaacttctcataaaatcatattaacataccactcttaattgtcagactatttaaataaataaactacttcatttttgcgttttactgccgaattaagatgaagtaaaagctaagtcgacctaaaaaagcacccttctagtcgattaatctaaaagggtgccatatactttaattttaatacatgattgattctaaaaaagtgaattattccacagtaactgatttagcaaggttacgtggtttatcaacatctaaatctctgtgtaatgctgcatagtatgaaattaattgtaatgcaacaactgatactaatggcgttaacaattcatgtacatgaggaatgacataagtgtcgccttctttttcaagaccctccatagaaataatacatggatgtgcaccacgtgctactacctctttaacgttaccacgaattgataaattaactttctcttgtgttgctaaacctacaactggtgtaccttcttcgattaaggcaattgtaccatgtttaagttctccaccagcaaaaccttctgcttgaatgtaagaaatttctttaagttttaacgcaccttctaaacttacgttatagtcaatagtacgtccgataaagaatgcattgcgtgttgtttctaagaaatctgtagcaatttgttccataattggtgcatcgtcaacaattgcttctattgctgttgttacttttgctaattctctcaataaatcaatatctgcttcacgaccatgctcttttgcaacgatttgagacaagattgataatactgcaatttgtgcagtatatgcttttgtagatgcaactgcgatttcaggacccgcgtgtaataacaatgtgtggtctgcttcacgtgataaagttgaacctgcaacattagtgattgttaatgatttatgacctaatttattagtttcaactaatactgcacggctatctgctgtttcacctgattgagaaatataaacgaacaatggtttttcagataataatggcatgttgtagacaaactctgatgcaacgtgtacttcagttggtacgccagcccatttttctaaaaattctttacctactaaacctgcatggtagcttgtacctgctgcaataacgtaaatgcggtctgcttctttaacatcattgatgatgtcttgatcaattttcaagttaccttctgcatcttgatattcttgaataatacgacgcattactgctggttgttcatgaatttcttttaacatgtagtgtgcataaacacctttttcagcatctgatgcatcaatttcagcaatatatgaatcacgttctacaacgtttccatctgcatctttaataataacttcatcttttttaacaataacgatttcatggtcatggatttctttatattcgcttgtcacttgtaacattgcaagtgcgtctgatgcgataacattgaaaccttcaccaacacctaataataatggtgatttatttttagcaacatagattgtgtctttgtcttcagcatctaataaacctaatgcatatgaaccatgtaataatgacacaacttttgtaaatgcttcttcagttgaaagtccttgatttgaaaagtattcaactaattgaacgataacttctgtatctgtttctgaaatgaatgatacaccttgtaagtattcaccttttaactcttcatagttttcaataacaccgttatgaactagagtaaaacggccatttgatgattgatgtggatgagagttttcatgattcggtacaccgtgtgttgcccaacgtgtgtgaccgattccaacaggtccatcaaaatcgctactatcagcaactttacgtaattctgcaatacgacctttttctttaaatacagttgtattatcatcatttactactgcgatacctgcagagtcataacctctgtattctaatttttctaaaccttttaataataattctttggcattatcatagccaatataaccaacaattccacacataacgacattttcctccatattggaatagtacgcgtaaattatgatttattgccgataatttagattgacaatctgctttcataatataaataggaacatgctatcatcgcattcatccataacaaattaagcatagttatttttacaactatacaaattgctcacactgtactttccatattaatattttttatattcaatttctggcgatcttattaactttgtccattaagtcaccctaatgttttacttaataagctaacgaatgagccacatccgggatagcatccgccgatctattcgatcactatcctcctcgtctacaaatacatatattgcactctataaaggccactcatatattaacctttaatcttcaaatacaaatatttatttgcacaggcgctttaactgtactgccgaactttccccctttccattaatcattattgtacaacggtgttgttttgttttgcaaatattttcacaataaaattttaaaaatcctaaaacaatttttttgttttactttttcaaaatatctatactgtcacattgatgacactttatttaattttgtcacatttattttgacaaagttgatttttgtttatattgagtaacaagtaacctctctatacactatatatagtcacatatattaaaaaagaggtgtaaacatgtcacaaactgaagagaaaaaaggaattggtcgtcgtgttcaagcatttggatcattcttaagtagtatgatcatgccaaacattggcgctttcatcgcttggggttttatcgcggccatttttatagataatggatggttacctaacaaagatttagctactttagcaggaccaatgattacttatttaatcccattattgatcgcatttagtggtggtcgtttaatttatgatttacgtggtggtatcatcgcagcaacagcaactatgggggtcatcgttgcattacctgatacaccaatgttacttggtgcaatgattatgggtccacttgttggttggttaatgaagaagaccgaccaattgattcaacctagaacgccgcaaggttttgaaatgttatttaataacttttctgctggtattttaggatttatcatgacgattgcaggatttaaaattttagcaccacttatgaaatttattatgcatattttatcagtggcagttgaagcattagtacatgcacacctacttccacttgtaagtattttagtagagcctgcaaaaattgtatttttaaacaatgcgattaaccatggtgtattcacaccgcttggtgcagatcaagctgcaaaagctggtcaatcaattttatacacaattgaatctaaccctggaccaggtttaggtatcttacttgcttatatgatttttggaaaaggcactgcaaaagcaacgtcatatggtgctggaattatccacttcttaggtggtattcatgaaatttatttcccatatgtattaatgcgtcctttattatttatcgctgttattttaggtggaatgactggtgttgcaacttatcaagcaacaggatttggatttaaaagtcccgcgtcaccaggttcatttatagtttactgtttaaatgcacctagaggtgaattcttgcacatgttactcggtgtcttccttgctgcacttgtatcattcgttgtagctgctttaattatgaagttcactagagaaccaaagcaggatttagaagctgcgacagctcaaatggaaaatactaaagggaaaaaatcaagcgttgcttctaagttagtatcttctgataaaaatgttaatacagaagaaaatgctagtggtaatgttagtgaaacatcttcatcagatgatgatcctgaagcgctattggataattacaacactgaagatgttgatgcacacaattacaataatataaatcatgttatttttgcctgcgatgcgggtatgggttctagtgcaatgggtgcaagcatgttacgtaataaatttaaaaaggcgggcattaatgatattacagttacaaatactgcgattaatcaattgccaaaagatgctcaattagttatcactcagaaaaaactaactgatcgtgctattaaacaaacaccaaatgccatccatatttcagtggataatttccttaattcaccaagatatgaagaacttttaaataatctaaaaaaagatgatcaagcataataattaaataaattaaaaaatggaggataccgccatgttattgagtacacgtgaaaaagaaatgatagccctattgattaagtaccacggtcaatatatcactatacacgacattgctcagcaacttgcggtgtcctctcgtactattcaccgtgaattaaaaggtgttgaagcatatttaacttcattttcattaactttagaacgcgcaaacaaaaaagggctacgcattgctggcacagattctgatttaaacgatttgaagcaatcgattgcacaacatcaaaccattgacttatctgttgaagagcagaaagtaattattatatacgctttgatacaagccaaggagccagttaaacaatatagtttagcgcaagaaattggcgtttctgtccagactttagcaaagatgttagatgatttagagcttgatttaaataagtaccaactatctttatctcgaaagcgtggcgaaggcatttacttggtaggtactgaatcaaagaaacgtgaatttttaagtcaattaatggtgaataacttaaatagtactagcgtttattcagtaattgaaaatcattttgtctttcattcattaaatcaaatccacaaagactttgttgacttagagcgcatttttaatgttgaaagactattaatggactacctaagtgccttaccctaccaacttaccgaatcaagttatttaactttaactgtccatatcgtgctatccatttcacgtataaaaaatggtgagtatgtcgcattaaacgatgatatttatgattctgtacaaaacacatttgaacacaaagtagcaagcgaacttgctgataaacttggtcaaatatatgacgtcacgtttaatcaggcagaaattgctttcattactatccatttacgtggagctaaacgaaaaaatcttaatgatacatcattaaataatcgttgtgaagaaaacaaaattaaagcgtttgttaacaaagtagaaatgatttccggtatgacatttgcagatttggatactttagtagatggactgacgctacaccttaatcctgcaatcaatcgtttgcaagctaatatcgagatctataatccgttaacagacatgattaagttcaaatatccaagactatttgaaaatgtaagattagctttaaatgattgttggcctgatttgatttttccagagagtgaaattgcttttatagttttacactttggtggctcgattaaaaaccaaggtaatcgatttttaaacatattagtcgtttgcagcagtggtatgggaactagtcgtctattatcaactcgtctagagcaagtttttagtgagattgagcgtattacacaagcatcagtcagcgatttgaagtcactagatttaagtcaatatgatggcattatttctactgtgaatttagacatcgactccccctatttaacggtaaacccattattaccagatagtgatatcagttatgtcgcacagtttttaaatacaaagtctacgttccaagagacgcatgataaatcatcaaacatgattgataaggatgatgttcatgttgaaacgaaagatattgatggcaatacatcttttgaaaatgaacaaacttcatacttaacttcagttttcgaaaaacatttaagtgacgaaaaatcagaacaattaatgcatcatatgcgttcgggtttaactttgcttgattcagtgaaaatagttagtaccgaagttaaacagtggcaaacatatatcgcagattatctatatcaatgcgatgcaataaacgatccaacgtcattcgctgaactactagagcaacgattgattgacaatccaggatggatattaagtccatatcctgttgcgataccacacctaagagacaatatgattaaacaccctatggttctaatcacagttttagaagaaccgttaatattgcctagtattcaaaatgacaatcaaacaattaaatatatgatttccatgtttattcctgacaatgattttatggcatcactggtaagtgacttgtccgaatttttaagtttgaaattagaatctattgatacttttatggaaaatccacaggaacttgaaacattattaagaaacaaatttttagaacgaattaaaaaacaatttatttaggagtgtacaaaatgagcgaattatttagtaatgacaatatctttttaaatgtaaatgttaacagccaaaatgaagcaattgaaaaagcaggtaaagccttagttgatagtggtgctgtaacagatgcttatattcaagcaatgaaagatcgtgaacaagtcgtatcaacatttatgggaaatggcttagcaattcctcatggcacagatgaagctaaaacaaatgtgattcactcaggtttaacattattacaaatccctgaaggcgttgactgggatggcgaagtagttaaagttgtcgtgggaatcgctggtaaagatggcgaacatttagacttgttatctaaaattgcaattacatttagcgaagaagaaaatgtggatcgtatcgttcaagcaaaatctgcagaagaaattaaacaagtattcgaggaggcagatgcataatgaaagcagttcactttggtgctggtaacataggtcgtggtttcattggttatattcttgcagacaacaatgttaaagtaacatttgcagacgtcaatgaagaaatcattaatgctttagctcatgatcatcaatacgatgttattttagctgatgagtctaaaacaacgacgcgcgtgaataatgttgatgcaattaattcaatgcaaccttctgaagcgttgaaacaagcaattctagaagctgatattattacaacagctgttggtgttaacatactacctattattgctaaatcttttgcgcctttcttaaaagaaaaaacaaaccatgttaatattgttgcttgtgagaatgctattatggcaactgatacattgaaaaaagcagtacttgatattactggccctcttggtaacaatattcattttgctaactcagcagttgatagaattgtaccattacaaaagaatgaaaatatattagacgttatggttgagccattttacgaatgggttgttgaaaaagatgcatggtatggtccagaactaaaccatattaaatatgttgatgatttaacaccatatattgagcgtaaattattaactgtgaatacaggacatgcatatttagcgtatgctggtaaatttgcaggtaaagctaccgtattagacgctgtaaaagatagttcaattgaagctggcttacgccgtgttttagctgaaacaagtcaatatattactattgaatttgattttactgaagcggaacaagctggttatgttgaaaaaataatagaccgtttcaacaattcttatttatctgatgaagtgacacgtgtcggacgaggtacgttacgtaaaattggccctaaagatagaattataaaaccattaacatatctttataataaagatttagaacgcactggtttattaaatacagctgcattgttattgaagtatgatgatacagcagaccaagaaactgttgagaaaaataattacattaaagaacacggtttaaaagcgtttttaagcgaatatgctaaagttgacgatggcttagccgatgaaataattgaagcgtacaattcactttcataatttattgagctttgtttgaaacaagaagtttccaacgttattcgttaacaatcagtaataatgtagtagttccgttgaattaacaatattaaatttctgaacataaaaaatactcccttcaacatagacacttaacttgtgttatgtatgaaaggagtatttttgcgttaataacttgttttattttcgagccacagccacctattcgatggctattggtcattactaaaacaaattcatattaactgttagacttggttacttagtaaggaatatttccctatgaaataactagatgttcacattcttgaataaattttattcttcagtttgttggtctttcttagtgaatcttctaattaagaatgccatacctgcacctagagctaattcagcatatggtaaatcgtcattatgtgacataccagtatctggtaaagttttagcttgttgtttaggcttattaacttttccttgttgggctgattttgtcttagcttggtggtcgtcagtgttagttacattaagcatatcttgattagcactattgcttccatttgaaactgtagctaatgacgccttcatatcattagtttgcatatctttagctttattgtttgcaactgggccaactgatgtttgcgtatcattagtatctgctgttgccgtatcatctttttggctaacattagttgaagtcattttatcttttgcttcagaagatgcagatgttgatggtttattcgaaacttcagtatcagctttgcttggcgatttatctgcttcgttagatgcaacgttagtttcagacttaagttgtcctgcatcagtttgatttgtcgtactttcttctttatcttttgatgtattagaaggtacatttggttctgttatgtctgctgaaggcaatgtttcagttgttgattcaaccatactttgatttgttgaatctctaccatctttttctgccttagctttattttcagattttggttgtgcaaccttgccattagttgattgagattcagcactattatttacttcagcattttgttttgaatcatttacagatgcattatctttgctatcagcagatgatgctgcttctgtgctcgcagttgttggagccgttgctgttgatcctgttggtgcattctcgtttgttgctgtagttgtactattgttatttgttgtgctttctgctggcgttgcattatcagtttctgttacaggtttatcagttgtgccgttattagttgattctacttctggtttactagttacatcgttatccattgtcggactgtttgttgatgcatctacactagaattgttattagcttgcggtttatcatttgcatcatcagttgctgatgttgctgttgtttcacctgttgccgcatcactattatttggtgttgtcggagaagcgtctgctttgccattatctgtcgtctcagatacgttaggttgtccagtattttctggtgttgcattagcatttgaatttgctgttgcatcattattatctataccattattagtatcattagcatctggatcattctgaggcacaatcgcttcaattgcaggtatcgttacattttgtaattcagcaacttctgcatttgtttgtgttttatctaatttatcagcaaatctgtcaaaatatctacctaaatccgtacgtgcaatttctttcgccgatgcatctgcatctgcatttttaattatttctatttgcttgttaaccacttctctgattgcttccaaagcatttttcttaacttcaggattaatacgttgtgctttaagttgttcaagcgcactatttttgacagtagcgatttctgcatttgtagtttgatcagaaatatcttcagttgcttttgataaaatgtcttctaaagcattcgtaaacgcttctttttcttcagttgtagcatcagcgtcgacatttacacctgcttcaatctggtctagtgcagtttctaattcttcgatagctttttgtttttctgttgagtcgatttgaatgttatcaaatgcttcaagtccttgagctttcgctttttcaacttcagcagttgttgttgcatcagtaataccttgtttagcttgatctgtaatttgtttaatcattgctaatgcttcagttttttcttcagcagttaactggtcactttgatcaatagattctttcgtatcttctgctttaacttcaatagcttggttcgctttaggtttaacagtagcatctacttgaatagcatcaattgctgctttaccttgtgttaatgcatcatcaacgtcaccattatccacaccattattaatgctttctaatgcagtttgaacattttggtcaacttgcttaattgcttgttgcttttcatcttgtgttgcattagtgtcagctgaaatattatttttcttttgatctgcataagcatataaatctgttgtagctgtttcttttttaccggttggaattgtgtaatcattaatattatctaagtcattatggatttgaacttcaatgtcatctttagaagtagcttgattaacattttgatccgctgtttgttttaattcagcgagtttttgtttcgcttcagcaatttcacttgaagtcgatgcgttagagttatccgcttcgtttactttagcattatatgcatctgcaattttagctaaagcatcttttttgtactcactaaatgttttaactgcattaattttagcttttccttctttaactgcattatcaacatattcatttgttgatgattgatcgacatttgttttcgcttgatttaacgctgcatcaacttcttgttttgcatcgttaatttcttgttgtgacgcatttggtgtttgttcgatttgtgtttttctatcagctgctgcttgatctaaagcagttttacctgctggcttcttaacaggatttgcatgaagttgttgaactttttgtaccgctgtgtctttagcagtagttacatcacctgttgtatttgctgtatttatattgtttaaaccttcttcatatgttgctctaactggttctatatcttttcctttttcttcatttgtagtcgtattatcactaagaatttcagttattttattttgcatttcagttagcaattccgctctagcattcgttttaacatctgttgatgcttgaattgggtcaattgcttgaattgcattttcttttgcagtgtttacatcatcgattgactgtgcattttcaatattttgattaccttgtgttaattgtgcgtctacttgttggtttgcttgttctttttcttcagtagtcgcatctgcagtttgtgcaataagcgctttttgttcgtttgcttttgttgctaattcatctttcgcaacatctttaattgttgtatctgcagtaataccttgaatatcagcaactgcttgatctttaatttgcgtaacatcattagttgtttgtgcatttaagatatcttgatacgctttttctttagcttttaaaactaaatcttttgctgcatttttctcttcagttgtagcaccagttgtattatcaattgcttgattttgagttgtcacagcttgatcaacatcatttttagcatttgatttaaccgctgttgctggttgcgtgctttgaattgaattctttccagcgtctttcgcctgatctacaccattatcatcagttgcagctgtaatattatttttcgcgtctgtaactgctgttgctaattgttgaatagctgcttctttttcttcagttgtagcgttctgatcattattgataacatttgtttgcgttgcttgtaattgatcaatctcatctttagccgcttgtttcttcacaacttttggtgttaccgcattaattgctgcttctgcatttgctttagcttcatcaacttgtgcgttagtagttgctgctgaaatggcttgatttgctttaccattttcagtatttgcttcagcatcagctgcttgtttttcttcatctgttgcatctggcgtagcttgaatctcttgcaatttgttatttaaaattgttgtgatttcattacgtgcagttgcttttttattaactgttggtgttacttgatcaatactagtttcacctgtcgttttcgcttggtctacatcattttgactattagcagcttcaatgttgctatttgcttgtgtcacagcattatctacgtccgcattagccgctgcaatttcttcagcagtactgtcttgcgtttgagcgattgctgttttacgttcattcgctttcgtagcaattgcttctttcgcattatctttagttgttgttgctggctgaatcgcttcaattttagcaatttctgcatttttagccgcttcaacttccgcatttgtatgtgctgcatctattgctgcatcagcagtcgttttttcagtttgggcttgttgttttgcagctgttttttcttctgttgttgaaccgttattagcatctattgctgtttcttgagcttgtactttatctgcaattgcttgtttcgcttgaggtttaacatttgcatcaggtgtaatggctgcgattgtagcttcatttgtagtttttgcattatctacatctgtatttgctgtagcattatctatatcagcgtttgcagtaactactgcttgatcaactttgtctttcgctgcttgttgttcttcagtagtcgaatcattcattgcttcaattgcagttttgcgttcacttgctttttgagcgatttccgctttagcatccgatttcttagttgtggccgcttgcacttgattaattgcagcaataccattgtctttagctgttgttacatcactgtttgtatttgcagcatcaagatttgttcttgcttcttgctttttagtatctaattctgtatatgcagcttgtttttcttctgtagttgaagcattgctattttgaatttcttgtttacgtgtattatatgcgttttctacttccgtatcagctgcaggtttaacttttgcttgtgtttgaattgcattgattttatctattacttttgattttgtatcagcaacttcctgttttgatttaacaacttggatgtcatgtaaaccttgcttttgagctgcatctactgctgcatcagcttctgctacttcttcatttgttgcatttgaaactgtagcattttgagcttttctagctgttgcagcttgtttaacttcattataggcatccatttttgtttgcgtagagtcagtaatattttcaatttttgagatttcttcgtttttaactctttctaaatcttgtgcagtcgttgtcgcttcaattgctttaacaccagaaactttagctgcattaatacgttcaatagcttccgctacttcttcatttgttgtatcaggatttaaaggtgcttgatcaatttgtgcttgaacaacttcgtcaaattcttcaagagctgctgctttagctgttgtagcaggtgtagtttgattaatatcattgatcgcttttgttttaatggcttctacttgtgcatttgttgttgctgcatcaatatctttaattgcctttgtttcaattttaccaattttatcatttgctacatctttttcatcttgtaatgatgcatttgactttttaatttgttgtttacgagttgtaactgcttggataatatcttgtttcgcttgaggtttaactgttggtgtaatcacatcttgttctaacactgcgataccattatctttttcagttgtgacaccttgtgatgttgtttgtttattaatttctgcgattgcattatttttatcattgttaattttagtcacaagcgctgcaacttcatcttgcgtaacttttttactttgttgtgctgctgtaaccttttcttgagctttagcatctaattcagcaattgctgcttgattatcaattaatgcagcttgtaatttagttactaaaccgtcaatatccgcttgagatgcacgatttgcagtttcaacgtgattcgcatcttcatttaaaatagtgtctgcttgttgtttaagtttattgtattctgcaattgatgctgttgtgtaatgactattatcaacttgtgagtttacttgttgttgcaacgcatctttgttcatttcaaccgctactgaaaatggatctgcagttagtgtaatttctggttgcgtattattaattacaacatctgaagcagtacgatatgttaatttttcattaaaatcaatatttttaggtgtatcgatattcgcaacattaactttatatgataattttaaagatttatctgggaataaaacttctttagtgtgtgtaccacgtgccgttgtcacaccttggcttgtaaatgtaactttatttgcattttgatcataattaacagtcatatttttcaatactgtactgtcttcattaccattagggaatgttgtagttaatgaatcattaacgtaagttacaccttgtggtaatgttacttcatatttaaattgatctgcttttaatgaagcaccaaaattaccattgttaccgatttcagtattaatagtatattctttattgttagttgctttcggtgctaaatctctatttttgacatataaatgtgatcctgagaatagacctacattatcaatgaatgaatagtatttataaccatctttatttgttgtaattcttgaagcatcagcaactgctgtattgtcaggaataaattgtaaatctaaacgatcagcatcagttggtactttaaataaatgtgcagtaccagtcttagcaacatttacagttgctaattcagtatttttcttagcatctttaataactaaatttgttgcaccttgcttactattcgtttgcatagtagtaaagttaataattaattctgaatctggttttacatttacagtttttgaaataccgttaaagttaccatgatctgtagaatcatttgcattcacacgacctaatgcagccacgtttcctttagcttgatagttttgagggttattcttatcaaacatatcgcttcgtcttaattctgagttaacgaaaccaatcttaccgttgttaattaatgaataaccatttactttatctgtaacagttacagttggatcctgtctattctcatctgttgatatggcaggatcatcaaatgttaatgtcgtattaatactgccttcaccagtattgctagcatttggatcttgagtttgtgcgtttgctgctacaggtgctgctggttgcgctgctggttgcgctgctgctggagcattcgctggctgtgtttgatttgccggtgttgcattattattaggtgttgcttggttatttccttgacctgcttggtttgccggtgttgcttgatttccaggttgtgcttgtgcagcgttattcggatcagcttgattaccttgtccagctggttgtgtatttggttgtgctgctcctcctgctggattagcctgtccaccttggtttgctggttgtactgctggttgtccttggttggcaggtgcagctggctgtgctgtaggattagcttgagcaccagcatttgcgttaggctgtgtattggcatcagctggttgtgctggttgattttgtgcaggctgattttgctctgctgcagacgctgttgtcgggttagtagatataaaagtaacagtggcaattaaagctgaaaaaataccgacattaaattttctgatactaaatttttgttgtctgaataaattcattaagtcatcctcctggttgattattctcgctgttaaatgatttcacttaatcaactgttaagataagtagtagcatctgcgttaaaaacacaaagcaactctatctaattaaaattaattttatcatcattatatattgagtaccagtgtattttatattacatattgattactttgtttttattttgtttatatcattttacgtttgtactataaattatttctagaaacacaaaaaaaccgatgcatacgcatcggcttatttgtaatacagtatttatttatctaatcccattttatcttgaaccacatcagctatttgttgtgcaaatctttcagcatcttcatcagttgctgcttcaaccatgacacgaactaatggttctgttccagaaggtcttactaaaattcgaccttctccattcatttctacttctactttagtcataacttctttaacgtcaacattttcttcaacacgatatttatctgttacgcgtacgttaattaatgattgtggatattttttcatttgtccagctaattcacttagtgatttaccagtcatttttattacagaagctaattgaataccagttaataaaccatcaccagttgtattgtaatccatcataacgatatgcccagattgttccccacctaagttataattaccgcgacgcatttcttctactacatatctgtctccaactttagttttattagatttaattccttcttgttcaagcgctttgtaaaaacctaaattactcataacagtagaaacaatcatgtcattattcaattcttgatttttatgcatttcttgaccaataataaacataatttggtcaccgtcaacgatttgaccattctcatctactgctatgattctgtctccatcgccgtcaaatgctaacccaaaatcactttcagtttcaactactttttcagctaatttttcaggatgtgtagagccacatttctcattgatattatatccatcaggactacatccaattgtttcagtatctgcttctaaatcaccaaataagaatggcgctagtgatgatgttgaaccatttgcaccatctaaaacaattttcaaaccttcaaagttaacatctactgttgattttaaatagctcaaatatttttgtgccccttcaaagtaatctgaataatgtacaatatcattgccaactggtcttggtaattctgggttttcttgatccaacaatgcttcaatttcattttcttgttcatctgatagtttaaaaccatctgatccaaagaatttaataccattatctgcaactggattatgagaggctgaaatcattacacctaactctgcacccatatcgcgtgttaaatatgcaacacctggtgttgaaataatacctaatcgcatcacttctgcaccaattgaaatcaaaccagctattaatgctgattctaacatttcacctgaaactctagtatcgcgacctacaagtacacgtgggtgtttttcacctttgttatgtgctagaacatagccaccgtatcttcctaatttaaatgccaattcaggtgttagttcttggtttgcgacacctcttactccgtctgtaccaaaatattttcccattgtttactctcctttaatttagctatttattttacatttatataagccttcgtttcacttggttgtgctttagtgacatgttctggtaaattgatttttacagtcttttcagttgattctgaaataccatctaaatctacttctgcatcaacttcgcttatattttgtaagtcatctcgactaccgaagatttcaatttctttatcttctaaatcaatcgaacttaactctttatcatctgctaaactacctttctgtttaacatttactttaacctttttgctaaaaggctctactttaacttgtaaattcacttcattaggttgaatcgatacatttaatttattcagttttttatcaaaagccgttacttctgcgacatcttttgtgttaccattaatctttttattagttttaaaagtggcttttaaataagcgatatcattcaattgttcttctccacctgttactttaactgtttgtggtgaaacttcttgctttgtaattttataaagtggatcaatatcactctgacttacatcaggttgaactgtcatctttttagttactttgttttcaagcgtaatatttgctaatttaggttttacagaataatgaatgtcatcagctaaccctttaacttgatacttctcttgatattttccagctttagcatttgataaatcaatcactactcttaaatcttctggattttcaatttttattatctttgattgtggtcctgaaatagtcacattaactgtttcaggcgcttttgttaaatgcaaatctttagtgttataaagaatttcaacgggtacatcttgaatcgttttactagacttttgaccaagattaccagtgttaaagatatttccaaaaacattgttaacagataaaaagaaaaacaatgccaaaagaaaggcaataaatctcaagccccatttactttctagcatattatttcacacctttcttttgaaagcgtgtgccaaaccaatgttcagcaagcaactcttcaaaaatttcgtttgaaatgtctcgtcgtaattttccatcaaatgttaccgaaatatcaccagtttcttcagatacaataacggtaaatgcatcagatacttctgaaataccaaccgcagctctatgtcttgtacccaaacttttagatatcttaggactatcagacaatggcaaataacttgctgctgctgcaatcttagtgccttgaataatcattgcaccatcatgtaaaggtgtgttaggtataaagacattaattaaaagttcttgcgaaatatttgaatccattgcaatacctgtttcaatataatcttgaagacctgtttctttttcaaagacaattaatgcacctatacgtcttttagccatatattgcacagcctttgaaaccgattgaatcaatttctcttcatctttactatacgtattagaagtatagcgttttaaaaagctacctctaccaagttgttctaacgcacgtctaatttctggttggaatattactattaaagctaataccccccattgaataacgatatcgaataatttagatgttgcagtcaagttcaatatcatacttatctgctgaccaataacaattactaatatccctttaagtaattgtatcgctttagttcccttaaagaccgtgatgagaagataaagtacataccaaactatcagtaaatcaaggatactcgttacaatttttaacgtactgaggttttgaaaaaagttggaaaaatccataacatctcctccgggtaatatttttccataatacccattataccaatcatttacatcactgtcatacgaacatatatttaaatagaaaaaatttattttaaagattataactactcttaatcattttagtgaattaaaaaaagtagtgcaaaaagcaaaatatactttatacactacaaatcatttatttataataaagtttcaccaaaaaatgttccaactaatgaaaccgcttgttcagcagtatgattattactgtcaatcaatggatttacttcaactaaatccattgaggaaattaaatgtgattgatgcagtaattccaatgcaaaatggctttctctataactaagaccacccaaaactctagtaccagtgcctggcgtttcaagcggatctaaagcatcaacatctaaagataaatgaacgccatcaacattgcgtgacttcaaatattctattgtattttcaattacttcctttatccccaatttatcaatatctgacatagtaaatgttttaatattatgatctttgataaattgtctttcacctttatctaaatctctcataccaattagtacgatgttttctggcttgattacattactatttaattctaaaagttctttgggaccttcgcctgtcaaaatccttagaggcataccatgaatatttccacttggtgactcttcaggtatatttaaatcaccatgtgcatcataccaaataacacctaaattattataatgtttacttattgctgatactgaacctaccgcaatagaatgatctccaccaagaactagaggaaatctgttattttcaattgatgctgaaacctctttatttaatttttgattaacatctataatttcatcataatttcttaatcctttttgttcactatgaaatttttcaatgttcacagcaggtaccttaatatcccccttgtcatatacatcaaggtctaattgctttaatcttgaaattaatccagcatatctaattgctgttggtcctaaatcaacacctaattttctttgtccaaatgttgatggtgcacctataatatcaattgcttttgtctttgtcataagcgtccccctttgctctatgtaattaaagaataatgtatgcgcttaccattatcaagcaatagctacacatataatctgtttatcttattacttcataaaaaaaagcacttcccaaaaatggaaagtgcaagtagtgagccatagaggattcgaacctctgaccctctgattaaaagtcagatgctctaccaactgagctaatggctctaatggctgggctagctggattcgaaccaacgagtgacggagtcaaagtccgttgccttaccgcttggctatagcccaatatatagatggtggaggggggcagattcgaactgccgaacccgaaggagcggatttacagtccgccgcgtttagccacttcgctacccctccagcttattcatataattaaataatcaaaatggtggagaatgacgggttcgaaccgccgaccctctgcttgtaaggcagatgctctcccagctgagctaattctccaaaataatgactcctacgggactcgaacccgtgttaccgccgtgaaagggcggtgtcttaaccgcttgaccaaggagccatggctccacaggtaggactcgaacctacgaccgatcggttaacagccgatagctctaccactgagctactgtggattaatattatgcctggcaacgttctactctagcggaacgtaagttcgactaccatcgacgctaaggagcttaacttctgtgttcggcatgggaacaggtgtgacctccttgctatagtcaccagacatatgaatgtaatttatacattcaaaactagatagtaagtaaaagtgattttgctttgcaaaacatttattttgattaagtcttcgatcgattagtattcgtcagctccacatgtcaccatgcttccacctcgaacctattaacctcatcatctttgagggatcttataaccgaagttgggaaatctcatcttgaggggggcttcatgcttagatgctttcagcacttatcccgtccacacatagctacccagctatgccgttggcacgacaactggtacaccagaggtatgtccatcccggtcctctcgtactaaggacagctcctctcaaatttcctacgcccacgacggatagggaccgaactgtctcacgacgttctgaacccagctcgcgtaccgctttaatgggcgaacagcccaacccttgggaccgactacagccccaggatgcgatgagccgacatcgaggtgccaaacctccccgtcgatgtgaactcttgggggagataagcctgttatccccggggtagcttttatccgttgagcgatggcccttccatgcggaaccaccggatcactaagtccgtctttcgaccctgctcgacttgtaggtctcgcagtcaagctcccttatgcctttacactctatgaatgatttccaaccattctgagggaacctttgagcgcctccgttaccttttaggaggcgaccgccccagtcaaactgcccgcctgacactgtctcccaccacgataagtggtgcgggttagaaagccaacacagctagggtagtatcccaccagcgcctccacgtaagctagcgctcacgtttcaaaggctcctacctatcctgtacaagctgtgccgaatttcaatatcaggctacagtaaagctccacggggtctttccgtcctgtcgcgggtaacctgcatcttcacaggtactatgatttcaccgagtctctcgttgagacagtgcccaaatcgttacgcctttcgtgcgggtcggaacttacccgacaaggaatttcgctaccttaggaccgttatagttacggccgccgtttactggggcttcgattcgtagcttcgcagaagctaaccactcctcttaaccttccagcaccgggcaggcgtcagcccctatacatcaccttacggtttagcagagacctgtgtttttgataaacagtcgcttgggcctattcactgcggctcttctgggcgttaaccctaaagagcaccccttctcccgaagttacggggtcattttgccgagttccttaacgagagttcgctcgctcaccttagaattctcatcttgactacctgtgtcggtttgcggtacgggcacctattttctatctagaggcttttctcggcagtgtgaaatcaacgactcgaagacacaatgtcttctccccatcacagctcagccttaacgagtaccggatttgcctaatactcagccttactgcttagacgtgcaatccaatcgcacgcttcgcctatcctactgcgtccccccatcgattaaaacgattataggtggtacaggaatatcaacctgttatccatcgcctacgcctgtcggcctcagcttaggacccgactaacccagagcggacgagccttcctctggaaaccttagtcaatcggtggacgggattctcacccgtctttcgctactcacaccggcattctcacttctaagcgctccacatgtccttacgatcatgcttcaacgcccttagaacgctctcctaccattgtccaaaggacaatccacagcttcggtaatatgtttagccccggtacattttcggcgcagtgtcactcgactagtgagctattacgcactctttaaatgatggctgcttctaagccaacatcctagttgtctgggcaacgccacatccttttccacttaacatatattttgggaccttagctggtggtctgggctgtttccctttcgaacacggaccttatcacccatgttctgactcccaagttaaattaattggcattcggagtttgtctgaattcggtaacccgagaggggcccctcgtccaaacagtgctctacctccaataatcatcacttgaggctagccctaaagctatttcggagagaaccagctatctccaggttcgattggaatttctccgctaccctcagttcatccgctcacttttcaacgtaagtcggttcggtcctccattcagtgttacctgaacttcaacctgaccaagggtagatcacctggtttcgggtctacgaccaaatactaaacgccctattcagactcgctttcgctacggctccacatttactgcttaaccttgcatcaaatcgtaactcgccggttcattctacaaaaggcacgccatcacccattaacgggctctgactacttgtaagcacacggtttcaggttctatttcactccccttccggggtgcttttcacctttccctcacggtactggttcactatcggtcactagagagtatttagccttaggagatggtcctcccagattccgacggaatttcacgtgctccgtcgtactcaggatccactcaagagagacaacattttcgactacaggattattaccttctttgattcatctttccatatgattcgtctaatgtcgtcctttgtaactccgtatagagtgtcctacaaccccaacaagcaagcttgttggtttgggctcttcccgtttcgctcgccgctactaagggaatcgaattttctttctcttcctccgggtactaagatgtttcagttctccgggtgtgccttctgatatgctatgtattcacatatcgataacatgacataactcatgctgggtttccccattcggaaatctctggatcaaagcttacttacagctccccaaagcatatcgtcgttagtaacgtccttcatcggcttctagtgccaaggcatccaccgtgcgcccttaataacttaatctatgtttccaccatttttataagtcaaacgctcacatacggcttcgttttcattattttaaatgctcatttacataagtaaactctgctttaaaataatttaactcattgtctgctaaacgttttcttttataaaaagatttaaacgcgttattaatcttgtgagtgttctttcgaacactagcgattatttcttatgaattcaagcttatttaaaactctttattcactcggttttgcttggtaaaatctatattttacttacttatctagttttcaatgtacaatttctttttagtcaagcgctcgcatactgctttattttcaaaaaatcaaatgctcatttacaaaagtaaactccgctttaatttttcttaatgcattgtctgacaaccgctttctttaaaaagaatagattgtcaagcgctcgcataagcaatatcactttaaccaaaaaatatttgaatgttaaataaacattcaaaactgaatacaatatgtcacgttattccgcatcttctgaagaagatgttccgaatatatccttagaaaggaggtgatccagccgcaccttccgatacggctaccttgttacgacttcaccccaatcatttgtcccaccttcgacggctagctcctaaaaggttactccaccggcttcgggtgttacaaactctcgtggtgtgacgggcggtgtgtacaagacccgggaacgtattcaccgtagcatgctgatctacgattactagcgattccagcttcatgtagtcgagttgcagactacaatccgaactgagaacaactttatgggatttgcttgacctcgcggtttcgctgccctttgtattgtccattgtagcacgtgtgtagcccaaatcataaggggcatgatgatttgacgtcatccccaccttcctccggtttgtcaccggcagtcaacttagagtgcccaacttaatgatggcaactaagcttaagggttgcgctcgttgcgggacttaacccaacatctcacgacacgagctgacgacaaccatgcaccacctgtcactttgtcccccgaaggggaaggctctatctctagagttgtcaaaggatgtcaagatttggtaaggttcttcgcgttgcttcgaattaaaccacatgctccaccgcttgtgcgggtccccgtcaattcctttgagtttcaaccttgcggtcgtactccccaggcggagtgcttaatgcgttagctgcagcactaaggggcggaaaccccctaacacttagcactcatcgtttacggcgtggactaccagggtatctaatcctgtttgatccccacgctttcgcacatcagcgtcagttacagaccagaaagtcgccttcgccactggtgttcctccatatctctgcgcatttcaccgctacacatggaattccactttcctcttctgcactcaagttttccagtttccaatgaccctccacggttgagccgtgggctttcacatcagacttaaaaaaccgcctacgcgcgctttacgcccaataattccggataacgcttgccacctacgtattaccgcggctgctggcacgtagttagccgtggctttctgattaggtaccgtcaagatgtgcacagttacttacacatatgttcttccctaataacagagttttacgatccgaagaccttcatcactcacgcggcgttgctccgtcaggctttcgcccattgcggaagattccctactgctgcctcccgtaggagtctggaccgtgtctcagttccagtgtggccgatcaccctctcaggtcggctatgcatcgttgccttggtaagccgttaccttaccaactagctaatgcagcgcggatccatctataagtgacagcaagaccgtctttcacttttgaatcatgcggttcaaaatattatccggtattagctccggtttcccgaagttatcccagtcttataggtaggttatccacgtgttactcacccgtccgccgctaacatcagagaagcaagcttctcgtccgttcgctcgacttgcatgtattaggcacgccgccagcgttcatcctgagccaggatcaaactctccataaaaattatgatgtttgattagctcataaatactaaataatgtttgtaacttatagttacatttttttgaattaacgttgacatattgtcattcagttttcaatgttcattaatgttcaatctcttttattctacttcatttatttcttgaagtcaataactttttgaacgattactttatttattctatattgtttttatagttatttcaatggtaagttttacacttttgaaattcttctttaaaaacaactgcgtcgtttttgacgactttatcatattatcaactttggaatttaaagtcaataacttttttaaaactttttgtgttcacaacccgcttctttttcaacgcgtttattgcttaacacaagaacttattttaccagcattccaaaacaaatcaacataaaaacgtacaaaataaaagtaattttgtacgtttagcatatattatacctatttatttgtagcagctataactttttgtgcaatcgagctataaattttacctagacgatcatctgattgatatattgacggtgcaaaatcttttggattccaagatggttgctctaaaggtaattccccaagtaattgagtattaagttcatcagctaacttagtaccgccacctttgccaaagacatattctttattacccgtctctttactttcaaaataactcatgttttcaattacgccaagaatagaatgatccgtatgttttgccatcgcacctgcgcgagctgcaacaaatgctgctgtaggatgaggtgtcgttacaataatttccttacttgaaggtaacatcgtatgaacatctaaagctacatctcctgttccaggtggaagatcgagtattaaatattcaatgtctccccatttaacttctgtaaagaaattcgtcaacattttacctaacattggccctctccatataactggcgcattttcttccacaaaaaaggccattgatataactttaacgccatgacgttcaactggaattacttccttccctttaattccaggcttttcatcaatacccatcatatctggtacactaaatccatatatatcggcatctactaatccgacttttttcccttcacgagctaaggcaacggctaaatttactgcaacagtagatttaccgacaccacctttaccggaggctattgcaataaattcgactggattattttgagataataggccttctatcgttttaggtttattttcttcttttggtttaaattgatttactttttcttccggcaatgtttcaaatcgtataccgaccgttttcgcaccgttttcttttaatgcattaacaacagccatctgtaaatctaattgcggtgcaccacctaattgtgccattgctaatttaacactcacatgttctttttcttccttaatagaaacttcaacaataccttctgtttcttttaaaggcacatctataataggatctttaatttctcctaccaattctttcacttgatctaccgttaacaaagcaaatcccccttaatcattttaagacatctacatcatagcaaataacaatttttgcttagtctatcactaaaagtataaaactttttattaaataaaaaagcagttagcctattattttaaatagaccaactactataattattttaaaatttccttctattactttctatttctttaggttctcttataaaaagtgctatcacataagctgccataacaagcacagctacaaaagcaaatgagatatccacccctatagcaatggattgctgtttaatttcagttgcagttaaatgcgatggcgatgtagataaaaatatttttgcaccaaaactcattaatgtaaccattaaagctgtgcctagtgaaccagccattacacgaccaaagttcataatagccgtgccatgtgagatttcttcatttctcaaagaattaattcctgtagtatttatcggcatcatgagtaaagaaactgaaaacattctaattgcatatacgactattaaatacgtataagatgtgtctgtatgcaagaaacacaacataattgtagtaattgttaaaattgtaaaaccagtataaatcaatggtctaggaccatacttatcataaaatttacctataaaaactgacataataccatttattattgcaccaggcatgataacaagtcctgataacaaggcagataaagataaactgttttgaacatatagcggtataagcagcgcaggtccaaccattgacatcattataatcattgaactaatcgtacataatgcaaatgttctatttttaaaaacccttaaatttaaaagtgcattagtaatattaaattgtctacgtataaataaatagataataaccatacttattatcaacgcacctattactattggacttgtaaatcctaaatctcctgcactactaaatgcgtatagcattaacccgaatccaatagttgaatacattactgagcgcttatctaatttcgtatatttcacttcattgtaacttgagattgaaactaagccgaaaacaaaggcaactaaagcaattcctacaattataataaatggtactcgccaactcgcttgatcaataattaatcctgtaactgtagggcctattgctggtgcaaattgaattactaaacctgctagtcccattgcaaaacctcgatgttctttactgaacaatgtaaataacgtaaattgcattaagggcataagtacgcctgcacccatcgcttgaattacacgtgctaacattaaaactccaaaattcggagctaaggctgcaacaatagaacctaataaaaatgtccccatcgccgctaagtataaaggtctagttttaattctatccattagatatgccgtcagaggtatcatgacgccattaacaagcataaacccagtaactagccattgcgatgtactttcattaatatttaattctctcattatactaggtaacgctgtatttaataatgtttgatttaaaatagctacaaacgcactaatcaacataacagcaactatgaagtttcgtctccgggttgttaattcaactttagccatcataattcctcctttttaaaacagatatacacttgtccctttaatacatatagccattaacataatgggagtagtactcaaatgataaagaagcactacataataaatcattattggttcttacacattaggcacagctaatgtgtacttaaaaaactaacaatataacattgtagggcctaataatttattttatgtctcagactcatacaatggttatttaacttatttaccacaaattgagcactaagactcactattatcgattcttctattgaacaaaaagaagttggaacacatatgtgccctcaacttcagatatctattttctattatttaaatttttactttcagggtaaaattgaagcttacaaacatataagaaccctataataaccatgatgacccaaaaatcgatattgatataaacataatttaaatgaatgatgaaataaaataacgttgttgcaactgtgtaagaaatcaaatgaaaagtcgcgcctctaaaatatgcattttcaggcaacatttttctaaaataatccattaaatgctcgactgcaaatatgatgaagtacccaaagattatataactgccataatataataggttatcgtacatacttctattatatgtaaagtcacccaacctaaaataaataagtattctacttaatccatataaaccaaaccctagaaatgttaaaaaaatcgcaccagaaagtacaaaaataaagagaacaatcattgtagttaacaagttataaaacttatgtttaagataattcacaatcattggcctccttattaataaaatattgaacgatttatctagtatctaggaaatttattatttcttactttaattacactacatcaattttaatcataattctattcttttgattgagatgactgttctttaaaaaatacgacccataaaacaataagcccaatgctaattacagcaacagcacttaacacattgtgtaagtttggaccaaagattcctgattgtatcgcataaagatatcccattattgttgaacctattgatgccccaagatttttagttaatccataaaatgacatcattttcttcatttgtaatgggctagtttcctcttggacaattacactatctttcgtataaatatatccaaaacttaatcctgccaaaattaacacaaatgctataagtaccggcaatttaataccaaatgaaatgataatactacttactagtagcaatgtaaatgatagtaagtaaataactttccttgatagttttgcttcaattcgatgtaaattaaaattcaatgtaatccaagctacagataaaggaaaaataaccaatccactttgcaatggagataatcctagttgttcttgaaggtagactggaatatataaattgaatcccattaaacaaatagctgttagaaggtccgttataaaaactaaagtaattgaacgattaaattccaccacaggtaaaaatggtgaagaaacatgtttttctactttaaataaacacattgccacaacgatagctaagataaaactcaagaaatttaaaagtaatagctgttggtttaataaagcaaacataatcaatccaataaatacataaaatagcgtgagccctttagtatcaaattttgatttagcaactgtttcttcctctggaaaatgaaatgtccatataactaatataatggcaatgatcgcaatcggtatatttatgtagaataaccaatgccatgttgcaaattctaatataccaccacctagaagtggcccaatgatactcgaaataccccaaacactgccaactatgcccataattttatatcgtaacggaatttcaaatgctaactttggaacaatttgcgataatgacatcaatacacctgatccaaaaccttgtatcacgcgtgatataattagcatagtaaaattagtacttaaaccacacataaaactacctatactaaataaaagtaatcctgcaattgccacataaataattttaaatctcgaaagtaattcgcccactataggattggcaattactaatgcgataaaatacgctgtgaaaattaatgaaattaaatttcctgcatttaaatcttgtttaattgtaggtaatgcaagcgaaataatagatgattcaatcgctgacataaacataattaatattaaagctataacagttatgattgactttaatcgcatgaaatacctccttctatatatatttatttataagattttatttacaaataattggttttcatatgtataaacacttttgactttcaaatcttaacgataattctattacaatacaatcccctattagaatgatttatgtaataaaaaaagcggagtttcccccagcttttctaaacgactacataaaatataagattgcaattaaatgcaatagtgatgctattacaataaaaatatgccaaatcatatgaaaatatggtctattcttttgtgcataaaaccatgcaccaattgtataagacacaccacctaagaaaatgaataatatgaatatccatgatgtgcgaataaaaataattggtaacaagataatacctacccagcccatcactaaatagacaattaagcttaacttttggttaactttgacagctatggatttatataaaatcccccaaagtgtcgttccccataataaaataaatactgtccaacctatccaaccacctacaactgttaacaaaataggcgtatatgtaccagaaattgctacgtaaatcatactgtgatcgataatccttaaaatatatttatgaggtgtttcattttgcatagaatgataaatagtagatgaaataaacatcataaagatagaaataacataaatagacatactcacagacgcaagcgtaccatgtgcaatataactgtgcacagccgcatagggtaacactaataatgttaacaaagctgcaacaccatgagatgccgcattaccaatttcttctccaaatgataaagggatgatatccttaaatgtttctacgattgtgtcattactttttttagttgatttggacatcatagtcaccgcctatcattaaattaaacccattctacgtaaatcttctgttgcagttgcaacactatctttaccttctttatttttaagaggtgaaaattcttcttctctaggaacttgtaacgtgacaaaactagttccataagtaaatatgtcaaaatagaacaattcgaattttaaagttggttgttcaataacaccaaagttctcatctaattgtttcaaattcttaatagctaaatgataaggtaactcacgatttacagcgtttaaaataaaaccaagtttaaatgcatgaataccgatattagcattgttaaattgatttgcaacttctggatctaattctgaatactccagtactgtatctttacaatcgacattaactaaacgtccaacactttctcctggttttggttgaatcgttttagaagtaatatcgtaatcatgttctaccgtaaatcctgcaaatagtggatccaacacttttactaaaacattgtcgatattattcaagaaaatatacttaacgccattattagacatttcttctaagtatcctgccttgtctaaagatttaaacacgccaccattaccattcggcgtttccataatacgaccctgttgatttaaaattaacttcccttcttcactaagcgccacaatattatcttgtttaaagaaatggattgcttcttgatcatatccaaaataactatgtgcttcgaaataagctaaagtttcttcatgattgatatcacttgtcataatataccattgaatcgtatgtccagattgatgattcaatgtttttaattggttagcttgaagttcaaataaacttacaccttcaatttcaaacgaacctttagggcccttgtaaccaagtcttgttccttgaccacctgccatcaaaagtactgcaaattgtccttctttaatagcttgaagtccttgttcctctaaacgcttaatctcatcatcactcatttgtgatttaatatcatatttcacttcagaaactgcagatacatcatctattgttttcttattgatgtataaatcgttatataatttggcaataaaatctaaatctaatgacgctaccttctcttcaagtgcttctttttcattgttactcattattttttcatattcacacaaatgatcttgtttatatttagctaattgatttttatctagcattttatgcctcctgctgagtttgtaacctttaataatttattttctataaaaacttagtattccagttgcttattatatcattgatgaaaggctgaaataaaacataaactgttccgaccattaacgcagtagctaaagataagtctacaagtccacctgttttaaattggatcggtgtcttcacattaaacggtaacggataaaataatttcacgccttttggtgttatcatatctagtataacatgtgacactaacccaattataattgctgccatataataattaggcgtctgaataatttgcaataaaaatgctatgattgcgataaataatattgaatgcgtaaaggttcgatgtccaaagatcaatctcacaaaaaaactaattaccttaaaccttctgccaatcttactttgagtgtgacatatatcgggtaataagctagctagagttgctagaatgataaccgtaaccgacgaaaaaatatccgtttgaaaatattgtgttgttagcgctccaacgagcatgccgcatgaagcatgtgttttacctgtcatatttgttctcctttaatactcacattttaccatatccctaacaaaaacacgaacatattttcgggttaaaattcattagtatgacacaatttaaaaaagtatcacataactcttgaaaacgattacaaaatcgtttatgatgtatttacaaaatatttaaaggatgtgtttgaataatggcaatgacagtaaagaaagataataatgaagtgcgtattcaatggagagttgctgatatcaaaattcctacaagtgaaattaaaaatattacacaagaccaagatattcatgcagttcctaaattagacagcaaagatgtatctagaatcggctcaacgtttggtaaaacgaatcgcgttattatcgatactgaagaccacgaatacattatttatactcaaaatgatcaaaaagtttacaatgaattaactaaataaattgtataaaaaaatcattcatggtgagggcttcatgaatgatttttttaattgattcaacacccagcataaacaaatacaaaaggacaactgttcccataattttaacagttgtcctttttcacatatatttataacaaaaaatgtgccatcaaagaaataattggtagtgtaatgattgttctaatcaagaaaatcataaacaatttgccgatgcttacaggaatcttcgaaccaagtatgacgccacctacttcagacaagtatattaactgcgatatactaagtgccccaataacaaaacgagttatatcattttgtacaccttcaattaatatagaaggtaaaaacatatcggcaaaaccgataataatcgtttgagaagcctgtgccgcttcaggtatttgcattaactctaaaaatggaacaaaaggtttacccaatatgacaaaaaagggcgtgtagttcgcaataatggtagcaatagtaccaatactcatcactacaggcaaaataacaaaccacatatcaacgactgtttttaatcctgacttaaaaaagtcaataacgcccggtgctttaataccaacttctgttgcagtatcaaagccatgtctcaatgccgtctttccttctggcaatgcctcagtacgcgcactttcaggtacctccttagcatactcatcaggaattttatttaaaggccaaattcttggcataatgactgctgcaacgaggcaggatactatcactgataaatagaaagcaaaaaattgattttgcatgtgcactgtttcagcaactacaattgcaaaggtgatagaaactacactaaatgtcgttgaaataactgttgcctcacgacgagaataatatccttcaccatattgtctacttgtaattaagaccccaacagttccgtctccaataaatgatgctaaattatctaccgtcgaacgtcctggcaatgtgaataacggtctcatcactggcctaaaaataggtcccaacatctctaacaaaccgtattccattaatagcggtaaaaatagagctgcaaataagaatactgccactaatgttggcaataaacttgagaacaataatccacctgtttcatctgagtaaataacctttgaaccaattcgtaaaaatgtcatccatgcaaaaacaactgctaatattcgtaaaattaaccaaccaattctaacgttaaaagcattgttcattagcccgtcaggtttcaatttaacttttaaaatagttgaacaaatcagcgttatgatacccgataaagtaattatcgccacaattaaaaatggcattacgccacctaatacatctttaagcacgcctgctaaaaatgccacgggtaacgttgtttgcttctgtccatcttgttcgactggaattggtactagaaataataagataccaattaaagacatcgtaataaacttaagtctcccaatgactatctctttccttgaaaagctatccataaaatcaatccatttctctatgtattcgttttaagtatatacagaattctattcagttaacaaacatattccttatcattatatctttaaaaatgtttatgtatgcaaaataatgaataattacagttattaaatatacgctatttcttgtaatttttcaagatgaattcaaaaaaggttaagtacaattactgatttcgtacttaaccttttttaactctaatcatatgttagttatttcattcttcgtaataatattaagaagtatggtgcaccgataattgcaatgataacccctacaggaatatccagtggcggatgaatgccacgggctaaaccatctccaaatgttaacaatatagcaccaattaaccccgacatgataataacgtgtaatgttttatttcctattaattgtctcgcaatatgaggtgcaattaatcctaaaaagctaataccaccgacaactgaaattgcggatcctgctaatattactgctaaaattagcaatagcattttaatagttttaacttttaaaccgagtgcggttgcaacagcatcacctagattcaatacatctaattgataactcaataaaatgatgattggtatcgttattaaaaaccaaggtaatatagtataaatattcgacatatcatgaccatatagactacctgtcaaccaaacaagcgctttgtttgcttccagtggatttctgattaataagaactgcacaatcgccgtacatattgcgcctattgctaaaccaattaaggcaagctttgaacctttaacatcatattttgaaattaaaaatgataaaaataaacttactgcaaaggcacctaagaatgaacctataggtaatacaaacaatggtgctgttggaaaaatcataataataatcacagcagctaaactggcacctttagaaatacctataacatcaggtgaggctaacgggtttcttattacagcttgtataattgcacctgaaatagccaagctactaccgataataataccaagtaatgttctaggtatacgatactcatttaaaataaaatcatcttgtgcaaagattcccttaatagcatcaatcggatgaatcatgacagaccctacacataaacttatgaatatactcacaattaaaaggattgtgattaaactataacgacgtataattttcgttgtcatcatattcttttcacccctttaatcgttataaataagaagtaaagtgcacctacgaatgatgtcacaatacctacaggtgattcgtaaggatatgtaattaaacgacttaatacatctgatagtagtaacaaatctgcacctataataaatgttaatggaatcatgacagaccctacacataaacttatgaatatactcacaattaaaaggattgtgattaaactataacgacgtataattttcgttgtcatcatattcttttcacccctttaatcgttataaataagaagtaaagtgcacctacgaatgatgtcacaatccctactggtgattcataaggatatgtaattaaacgacttaatacatctgatagtagtaacaaatctgcacctataataaatgttaatggaatcatgactaaataattcttactcacatagcgtttgactatatgcggtacgattaagccgacaaatccaattggtcctgccactgacaccgacatacctgtaagaataatgactaatagtccaatgataattctaactttatttatattttgacccaatcccttagcaatgtcatcgcctagttccattatcgttagttgacgtccaataaaaatcgttgcaattaaagcaccaataagccatggtagaatggttaaaatctcatcccacttcatactggataatgaaccgacaagccaaaacatcacttgttcgtttgaattctcattcaaaataataataccttcggtcatactactaaaaaacaaatggatggccataccagccaatgctaatttaatgggtgtcatacctttcgtagcacctgaaagcgtataaacagttaaaccacctataaatgcacctatcacacctaaatataatgcataatattctaatgatggaatgataatcgtcacaaatacaatgaaaaacgatgcaccagaactgacaccaaaaattttaggtgatgctagcggattgcgtgtcattgcttgcattaacaaaccagataccgctaatgcaccgccaataaataaccctgcaatcatccttggcatacgtacattatgcaataaaaacgttgctttcgtatctgtatgaccagtaacatagtgaacgatatcgctaaaattaattttcgaagaaccaatcgccatatttaaatatatacaaataaaaagaaagcacaaactcactatatacgtgagtgttgtgcgtctttttcttttatgatttatggcagattggctacttatttcttttatagccatttacttccaccttacttttgttctttttttgataattcaacaagttctttagccatttcttcagaagaaattaagccacgagatcttgcccaaacatcacggtcaacaatatccacgcgattatttttaactgcattcaattttttccatgttgcatcttcttgtaatttcttgaattcagcagaatcttttttagcgtaatcagtcataatgatcatacgctctggatttaaatcagctaaatgttcagtgtctaattgtaagtaaggtcctttcaaatatttacttaaaccttttgttacatcgtcacttaatgcatttttaaatcctagttcgtttaaaaattgtccaacatatgaatagtttggatgtgctaataaaccagctttagcaactacagctggaagcactttttgatttctatcaaatttaatttcatctttatacttattgattaatttatcatgctcagcaagacgtttttcgccttctttttctttatttaaagctttagcaattgttttgaacgaattaatgttttgtttgtagtctccatcaaaactctttaatgataatgttggtgcaattttgtttaattctttattaatacctttatgtctactgctatcagcgataattaaatccggttttaatttactaatttcttctaagtttggctgtttacgtgtacctacagaagtataatccccaattttttctctaactggtttaatgatacgttttttcttaccatcatcggcaataccaactggtttaacgtctaatgctgctaatgcatctgcaaatgagtactctaatacaacgatacgttttgcatctttaggtacttttactgtaccattttcatcttttaccgaaatagtatctttagttgataattcttttttacttgaattatccgtattaccacaagctgcaactaaaagtaaggcaactattaatcccaatatactaaaagtttttagacctctcatcgttccactccttaatatgtataacttcatttattattttattgataacaattatcattgtcaagtagcgttcaatcttttttatattactaaaatgtatgactatatatttcctctaataattatgactacaattagcacatttccttagaaaaaatactgataatgtatcattgctatatcatctttgcattaatacaattgacaccatttagcatgaccgttatccctgtaattcagctgatattatctgttgcaattttatgtgacgaactgttgcacttaatttgataaatcaacaaatacaaaaaatctaagttgaacaattatgatacaaccgtgcaaacgatatgtagtataacttgtcaacttagacttattgataaatatattaatattggtttaccatagcgggagattttacatcaaaattttgaagtagcgtatcaatctttgaatcatcaatatataccttatgtaaatttttcatatacatcgaatgagaaagtgcttcataatttaatgaaaaagatatatgatctccaacttgatagtgtccttgaccatttaaatcaagcattaaatgatcactcgaagcgcctaaaatattgatatgctgatccataggtgaaatattatcgacttttgtatctaaataaccaatatctacaatagcttgtaagaatgattcatgcgtttgtgtattaactcgaggtttaatttctaaaatctcagcctccaatgtaatcgcatcttgatataacatagcgatcgcttgatttgtcgttgtatcaacacctctaaacaacgtttcacctattcgcaattcatttattttacccaaatcattatataaaagttgtggtaacatgctcgaattaccacctgaaataattttcaatcgatatcctatttctctttcaacagctgagacgaatcgattaatcataaagatatcatcatcacttggcgcatcagatttaaaacacataaaattgaatgctaaacctacaaaatggatatttttcaagtgaataatctctttaatataatctaaaacatcataagtcagaacaccttcacggccatctttccaatctaccattaataaaatcttatgtttttttcctaaaacttctgctacttcatttatttgatgtatggtagataattctgtttggatactcatatcaactttttctatcatatctgaaatctcttttttggcaggcgtacgcaataacgtatatgttaaatcctgatctgcaatactaattatgttatccaatctggattctgcaacatgattgatacctaacgcttttaagctttctacaattgtacggtcaccagctatacacttaattactggtgtgaattgtatatttttactttgaaaaactgtttgaagtactttggcgttatatttaatcttcgatatatttatgttaacgtgtgccatgtagtactacacctctttttttatcggattatctaactcaatatttaaatattgctttactttattttccattctcatatttaacaacgctttgacagtaattgttggtccaaacaaaatatcttttaactcatttgcatgtggtagtgttgggttaatagcatgcgctactacttgctgtactatgttaaataattcggtttcttcaacacaatcatactgattaaaatgatggattaattctgccatttgattttgaataacagcatgttggaattttgcaatcactgcatctatagaatcagctattaaactatcatttgtaattttaatatctgatacacgatgttgtaatgtttctaaatcaattctagaaccacctaaatctctcactaaaaattgaatgtcaaaatgtggccccaagttcactactgtattttgcatgtgtgcttctaatgcaattccataattttgaataaaagcaattaaaggcgggattaatgcttgagcgtatcgttcaataaatgtcgtaatactttctttagtaattccttgatttaaccactctaagtaactatccacgataactttttgatctattggatttttattaactagacttgcactaactactgttgcaccttttccatcaatttcaggcttttgtcttataatacaagcaagctgacgtgccctatctttatcaacatttgcatattcaccgaacggttccatagcaactttaaatcctggatattgattcaacatgttttgtaaagcataacttaactttggtccatctacagtagtcacagttgagactgttctaacggcacttgttgcttgtgcatcgacgggcaacttaacatggtatggtttatcaattaaagacatcgtcctaaatgataaagttgcttttgaaagtattgtaaacggcgttggaattaatatttttttagcaatccatgcttcaaaatatttccctatcgtatgatcatattgccaaggatgtactaaaatcgctctatagtcttcacttttcaaacctaaactctttaaaaacacacgaatctgattgtagtattcgggaattatttcatcaataataaattgatcattaccatccatagctgtgcacacaacatgatctttttcaatcatcataatttgcaaagggatttctttttcaaactcaggtgcatatgctcgtacttcttccatagttaagggcaatttcgttttggttaaagggtgtgttggatgcccctctggtaccaaactctcagaataagttaaatcatctgtcttatcactatcttttacatgttgtaaccatgaaaaaaagttaatatcttgtggtaaccttgaaaatttaaaactttgacttattaacgtttgtctgtgagacatttgcttatatgtttcaactaaactatctcgactgtgtattaactcttcgcgtagtcgctctgaaatagggatatcaaagtcatgattcaacacatctaataaaccttctaaagttataattaatgacgtttcacctttatttaaataagtaatatcacctgtaaactcatagcgttctaatgcactttttctaacaacttcaatagtcaacacatgcatatgatactgaatttcaattaaagatcctttttgcgaaataaatgtttgctcggggtaaatacgttctttaataatggcgttaattacacgatattgaatatttctatctgcctttgcccattcaagatataccatgattactttcctccaactttaacttcaactttctatttataaaatagaataccattgtaatgcatatagtacttattcccattattgaaaaagttctaacaatgccaaacacatctgcacatatactcattaacagacttcccaatggaatcatacctctatccatcataataatactcagtactttaccacgttcataatctttaacattattttgaaaataaacgcgatttgtcgtacgtgcccattgactaaataacccaatcaatgtaatacaaatgaacatgatgacaatattgtgaaataccacacctaacaaagcaatgccaaataaaagtgaacttaaataatacatatttaccataccaatatatttaagtactttaggtaaaactagcgttgcaataataccaccaatggcacacatcgtcatagcgataccaaatatttcagatttccccggaaatactttgtttgtcaaaactggtaaaagtgtcgtatatgaaaaacctgtcgccataatcaataatgatgttataaatatttgtcgaccttccatatgtaatttgaagtaatctataataacttttaacggcatgtatcttgttgcatcttcaggtattttagttactttaaaatgtaatggtaagcataataaaactgcgataaaataacaaattgcctgtgcaagaaatgttgttggcgcatgatagactgctaatatgacaccagcaatggcaggccctattgaacgacaaatattaatgatgaatgaatgaaatgatacagcttgtgtagtagatattttatctgataaatctggtaagattgcttgtcttaaaggtgtttcaaccgcacttaaaattcctcttaatgtcgcatatataataatgacgctaattggaattgcagtgaaactatacgtgagcacacataaaattgcagttactaaaaatgatgatgaaattgtaattctcagcaatcgccctttatcatatttatcggcaattgcccctgcccacacacttagtaataatattggtacaagtctgcaaaaattgacaatccccagataaactgcgttatgataagtggtaagtacaaaccaatttagccctatttgtccaatccaattacctagaaatagtagaaaagaactgctaaaaaaatattttgtcataaaacttacacccgcattctgttgataataagaatcattatcattaatatggattatacaaatctatcttgcttttgtaaaatatttcatagaggtgaattatgaacttgaacttaatttttaaagaacagacattaaaatttaacaaagaagaacaagaaacatatttatttttacaacaacataatagcgattgggctaatgtttttaaagagatgattttacaaggaagagataaagtcactcagagattggtcacatcaatgcatcgcgaaaacttagttaaagcgcgcactcaaagtaagaaaatattgagtcgtgatttgattatgttagatatctcaacgactcatatactagaaatccagttcccacaagctaagcaaacattatatgctcctatcactggagaacacgcctttgatcgaattgatgttgaaggccctttctacattaaagatgacattacaaatacgattacacgagtacaacatccaaatgaaattcttgagtgtattttaattgaagcaccagatttaaaaaatgctgctagtgatcaatttcagcaagatttaataaacagtgcaactaatatgacatttgcaattagctatcaagcactgtcaatgcaacatgattctgcacctttatttaatattatcgaaaatagcgaagatagttacttgcgttcagagcaagccgttattgaaggtcatccgctacatcctggggctaaattacgtaaaggtttaaatgcattacaaacattcctatattcttcagaattcaatcaacctattaagttgaaaatagtactgattcacagtaaattaagccgtactatgtcactgtctaaagattatgatacaactgttcatcaactatttccggacttaattaaacaattagaaaatgaatttacgccaaagtttaactttaatgattatcacattatgattgttcatccatggcaattagatgacgtattacattctgattatcaagcagaagtagataaagaattaatcattgaagcaaaacatacgttggattattatgctggtttatctttcagaacattagttcctaaatacccagctatgtcgccacacatcaaattgtcgacaaacgttcatattacaggtgagattcgtacattatcagaacaaacgacgcacaatggtccactaatgacacgtattttaaatgatattttggagaaagatgtcatatttaagtcctatgcatcaacaattattgatgaagttgctggtattcatttttataatgagcaagacgaagcagactatcaaactgaacgaagtgaacaattaggtacattatttagaaaaaatatataccaaatgattccacaagaagtcacaccattgattccttcaagcttagttgcaacctacccatttaacaatgaatcacctatcgtgacattgattaaacgttatcaatcagctgcatcattgtctgattttgaatcatcggcgaaatcgtgggttgaaacttatagtaaagcattgcttggtctcgtaatcccactagttactaaatatggcattgcattagaggctcacttgcaaaatgctattgcaacatttcggaaagatggtctattggacacgatgtatattagagactttgaaggtttaagaattgataaagcacaactaaatgaaatgggatacagtacatctcatttccatgaaaaatcaagaattcttactgattcaaaaacgtctgtgtttaacaaagccttttattctaccgttcaaaaccatttaggcgaattaattcttacaatctctaaagcatcaaatgattcaaacttagaaagacatatgtggtatatcgttcgtgatgtactagataacatttttgatcaacttgtactttcgacacacaaatctaatcaagtaaatgagaatcgcataaatgaaattaaagataccatgttcgcgccatttatagattataagtgtgttacaacaatgcgtcttgaagatgaggcacatcattatacttatattaaagttaataatcctttgtatcgagaaaataattaaaattatagaattttattaatcgtgagctcaaggattacattaacttattaaatacaatctatataaatgagagaataatacattttccatattcaaattattaaaaatcaaaaaaaagctcggcactaaaattgagtgccgagctttttatcgaataacttattgtaaaccttgtctttcttggttattgttttcgttatttttttcgtgtttttgtttccactctttttgagtcattacatcgtcaacttgcatgttaacttcaactacatctaaaccagtaatatatttaacttgttctttaactaattcagttactttacggaagatttttggtgctgattcaccatattctaagattacttttaaatctacagcagcttgtttttcaccaacttcaacagatacaccttgagtaacgttgttgccacttgagaatgcattagtgaatgtatcagttaagccacctttcatgtctaagatacctttaacttcacgtgcagcgataccagcaattttttcaacaacttcatcagagaatgttaatttgtttttgaattgaggctcttgattttgttcttgttgtttttgacgctcttctctttctttttcgttaacaccagtttgattgtcgtatgcttgttttgctttattgttatctacagtcataatagattctccttttacttgttaatttttatatttttttaattaaattctaaattgatgaattaactccatcgatttaaaaaattcataaaatcttgcttacggtctttcatatacccaatacctacaccaattaaacataaaacgatgataagtactgttttccaaaaacctaacgttaagaataatatcgcgattaatagaaacgctaggaaaccaacgattctccatttaaatacttttaaaaaattaatcacttgttgtgtagagtcttgtccgttttggttatgattgttagccatgatatacctcccttacaacactcgtggaccagaagttttctgatctctcacattaacttctaacttacgtactggcatttctgtgaaatattctacattctttttaatatccgaacgaattgcttcagttaaagattgaacttgaacattatttggtacgaaaaagtcagttttaatgtcgatataagatttattttttttgttatatagtttcgcaactacatttggttgtcttacttgatcatattttgcaaccgtatcgaatgccgtcttttcaacagctttacgagatacgtaaacatgaccatcatcgaagtctttgtataatccaggttttcgatgcgtaggtttgaagatactaaatactaatataagacctattaatatcaatagtgcagcaagtgaaataagtaatggttggaaccattcaaattgaaggaagtagtcttgatattcagttatacgtccatcttggatatacatgaataacaggaaccccacgattactactattaataagccaaggataaagtttttaagtcgtttcacccctaacgacacctccttagttaaagttaatttaaaaacatattaaatatgtacccatcagtttttttcttaaacataataaattaataactttaaatttatttttaatatataagatgaagtaccatttagtgatatattccctagtttttgtaaataaaacctcattattaattaattttcgtcaatatgttttgaagaacgatattctaaaatatctgggtcacgatgtttaattaaaaccttattactatttctcggtttctcctcactcaaagattttaaaagcgaccatatcatcgctataatgaccacggaaaatggtaacgcagcaatgattaataaattttgtatcgcttgcgtaccacctgtgtagatcatgataattgcaaataatgccataatgataccccaactcactttgacaaatgacttcggattaatatcacctcttgaactcaacatacctaaaacataagttgccgaatccgctgatgtaacaaagaaaatcataataacaagtaaagtaattaagcttaatacaaaacctagtgggtaatgttgtagcgttgcaaaagttgctgtttctgtcgcagctttagcaatatcggcaatatgattatcttgtaagtaaattgctgacgcgccgaataccgcaaagaatataaagcaaactaacgccgggacaaaaagtacacctagaataaattctttaatcgtacgtccttttgacacacgtgcaataaatatacctacaaatggtgcccaagatatccaccatgcccagtaaaagattgtccaattttgtaaccattggaatttttgaccgccagacggaatgcgtaaactcatactaaagaaatttgcaatataattacctagaccattcgtaaatgtatttaaaatgtatagcgttggcccaacaataaaaagaccaataagtactacaaaagcaagtaacatgttgatattactcaacgttttgatacctttatcgatacctgaccatgctgaccaagtaaataatatggttgcaatgacaatcaagattacttgcatcgtgaagttactcggtacattaaataaaaaatgtaaaccttcgtttatttgcaatgcaccgaaacctaatgttgcagcaacgcctgttactgtagctatgactgccaatacatcaatggcaccacctaaaggtccacgcattgccttttcacctaataaaggcgtcaatgtagcgctgactaagccaggatatcctttatgaaagctaaaatatgcaaacacaagcgcgacaataccatagactgcccatgcatgaatcccccaatggaaaaatgaaaactgcattgcatcattaattgcagattgcgtgccagctttatgaataggcgttaatttgaaggcatgactgattggttctgccgttgtccagaacacaagtcctattcccataccagcactaaataacatagcaaaccaagacggcaatgagaattcaggatcttcgccttcttcacctaatgtaatgtttgcgtatctcgaaaataaaatatacacacagacaaataaaataactaaaacgagcaataaataataccaagaaaaatgtagcgcaataaatgtagtaatgttttgcgtgagtttttctaactgtttcggaaatattgctccaaaagcaacaaatatcgtacatatcactaaagatacccaaaacactagacttactgatttatttttcataaatacaaaccctttctgtgtaatggtaagttcatacccataactgcaacattttaatcatttgtaattttatatagacacaattaataatgcctcatcttttaaaaatgatatataaaacacactcaaattatttatcattgagcaacaaagtattttattgtatttaagtaatgcctttctagtgcattattgaattgatacctgcaaagttgccatatttccgtttagaatcaatagtcgctagacacaagaaataagtcgccctatacagtattttctgcataaggcgactttacttactaaactatatattaattactaatttcccaatcattgattgtttttccaacaattgatgtgcttgatataagttttcaggtgataaaccttcaaaaacttgtgtcgttgttggttgataatgtcctgattctatatttttcgtaatatcttctaaatactcatgttgtttaatcatatcaggcgttcgatgaattggacgcgcaaacataaattcatgtgtaaatgttatactttttaattttagtgcatttaaatcttgatcttcattaaaagctacgatagttgtaatatgccctaatggttttatcagttcaatcatagtattgtaatacaagtctgtattataggtgcaaaatatataatctactaatggaatttctttttctttaaattgacgcactaaatcctctttatgattcaatacgatatctgcgcccatcttttcacaccactctgttgtttcttgtcgtgatgctgttgtaatgacagttaaaccataccgtttagcaatttgagtggcaatacttcctacacccccagcgccattaatgattaacacggatttacctacattttcagaaggattatgtgaaattttaaatgtatcaaaaaacgtttcatatgccgtaataccagttagcggtagactaaccgcttcattagcacttatgttgtgtggcgcttttgcaactatagcttctgacaccaattgatatgtcgcatttgatccttgtctatttggcgatccagcataaaatacaacgtcacccggactaaataatgtaacgtctggtccgatagcttcaacagtaccaatagcatcaaacccaagtacacgaggtgcttgagtgacttccatttgtcgttgctttgtatctacaggatttacactaatgctatttactttgactaagatatcatcgttttctggcgttggctttctttgttcgtatactttaaataaatttccttcttccaatttaaagggcttctcaaatcctatcattttcatatcgtttcacctcatttatgaacttatttcttattatacaaaatagaagccatgtgtgcttatatcgcagcatcatgactcctttttcatttgaatatataaataattacagacgactttcgtattacattttagacttatttctaccatgttactgaacaaatttgctttagataaaaaattattaaattttagtcaattaacaaagttagtttgtgaaaacgtatactttattattccgttactttaataacttgtttaccaaagttatcgccagtaaataaatttttaaatgcacgtggcgcattttcaaaaccatcttcaatggttacttgtgactgaattttaccttcttgaacccatgttgcaagctgttcactagcttctttaaaagcattagcgaattcacttactaagaagcctctcatcattacttgcttcttaataagcgtaccttgaatacgtggtccgatatcggcttcaggatgattatatgacgaaattgcgccacatactggtacacgtgcaaaacgatttaaatgcttaaatacttcatcgccaactgttccaccaacattttcaaaataaacatcaataccatctggtactgcttgtgctaacgcttctgcaaaatcctctttcttataatcaataccagcgtcaaagcccagtgtctctgttaaataatttacttttttgtcgccacccgcaatacctactacacggcaacctttaatcttagcaatttgacctacaactgaacctacagcaccagatgcagctgaaaccacaacagtatcaccggctttaggttgtccaatatcaagcagaccatgatatgctgtttgtcctggcattcctaaaacacttaaatataaatcaagtggtacatctgtcgttggaactttagtaatttgatccgcttggacatgattaatgattcgccaaggcaacatacctacaacgacatctccttttttataatctgcgagtgtcgaatcaattacttttgcaacgacatggctaacaatcggtttaccaatttcaaaaggctgtacatacgaatctgccttagtcatacgtcctctcatatatggatccactgaaatatacagcgtttgtacaagtacaccatcgctctcaagtttaggcgtgtcaatctcttcaattttgaatgtatcctcttgaggcatgccttctggtattttgttaaaaagaatttgtttattttgcatcattaatcacctttctttatttgaaacttttacttatttgttacttaagcgttaagtttgaattgtgtcttcgtgatgtctgtatgcaaatacattcttagttgttatattttgacttaagcactgattcattcatgtaacttcaaccacattatatttgctataatcataaatttaaaatgttacgacttagacattttatggaaactctcaaacaatagataatttttgaaaagctctaatattacaagcttttttgcccccgaaaaactagcagttgctttattttttccataagaagtcgattaactcattagcaacattttcattctcatgaagctgactatgctgtgcaggctcaccttcatatttagattctcgataacttttcggactatttcccagtaaatattttaatgatttcgaagaactattagacactctgccgtctgaatgtgtaccatctttcagatctccataaatatttagcacttcgatacctttacctttataaatatcttttagcacgcgtaattgctgataaggttgattcattcgacttggtttaccatctttatcaactgtaatttcattgacatcttcattcatatttaaaacaccattaaatgtccctgcaatattcacttgtttgtttaactgtggcagtgacttgtcgttaccatatgtcatcatatattgtgcaaatgttaagttccccattgagtgaccgacaaagttgaatttatcgaaattgtattcagattgtaacttagtcagtacatttttaaaccacgcagcattcttatccaaatagccttgtctgttattttcaagttcaattttcacaataggattcactgcatcttttcttagtttccctttaaatgtcactgcaccatcctttgaaacgtaagcagtgatgatatctttagttacccctcttttttctgcttgcttcaccataaacttttcagaattggcactaccaccaaatccatgtaagaacaatgttggaattggctttttaacaaattgctgttgttgtattttaaatgtttgtgcctgtcgttgactaaacaccaccgtaataatagagcctataataatagcgaccgctaacaatgtcgtaataattacaaaaattttcttcacacttttaactcccattcatgtcttttatataagtataaaggatgtgattaaaaatgtcctttagttgattttgaatacatcattaacttttaagatgactttggaaagttgtccgttaacatttgttaattgattgcttctttagctttcaatggtgtgtcacccattgattaatatataaatatgtatatgcatgtttaatttatctctttttataaataaagacctaccagcactcgactgataggccttttaatatctataattatttaatttcttttgtttcggctaactctttgtaccaataagcacttttcttaggataacgttcttgagtctcaaaatcgacatagaataaaccatatcgtttttcataaccatttgaccaagagaacacatccattaatgaccaaataaagtaacctttaacatttgcaccatctttaatagcatctgcaataacgttcaaatgttgtcttacataatcaatacgtgcatcatcatgaactgttttttcagattcaataaattcatctttatatcctaaaccattttcagtgatataaatcttgtgatagttaggataatctttaacaacacgcatgatttgatcatataaaccttgaggatagatcatccagtcccagtctgtgcgaggtacgtcgacatcaaattcacgttgtccgacacctttaagttggtatttagaaccgcctttatcacctgtcgcattatgcgtgatttcagattctccatcgtaacctctcatccagtcactcatgtagtaattgatacctaagaagtcgtttaaatctttggctgcatctaaaatggcataatcttcatctgtaatatttaatttaccgccattaacagataagatatgttgcacaccttccatcgtttcacgagaatacttacctaaatatgttgcatctaagatgaatttattatggatgatatcttctaattctgctgcacgaacatcttcaggatttgatggatcgaacggatattttgttggcaatgcgtgtacaacaccaatttctccttgatagccgccatccttgaataatttcactgctcttgcatgagcaaccatcatattatgatgagattggaaaactttttcaaaatcatatttaatacctggagggaatttacctactaaatattggccatcaccaattggtccaatttcattgaatgtagtccaatattttacttctgggaattctttaaaacaatattcagcataatctacaaagtagtcaatcgttttacgatttagaaaatcgccatctttgtgtaacacttctggtgtatcaaaatgatgcaatgttacaaatggttcaacatgacgtttatgacactctgcaaataacttatggtaatactcaacacctttagggttaacttcgccatatccatttgggaagatacgtgaccatgcaattgaaatacggataccattaacaccgaatttttcacttaattctaaatccactggatatctgttataaaaatcactcgctggttctgcagtgtaccaatagttttcttccaaatacgtatcccatgctacacgacctttaccatccgtatttgtcgcaccttctgcttgatatgctgctgttgctccaccaaaaataaaatcttcaggtaatgttttagtcatatgaaaaactcctattcttaattttcaaattgttgttgaacgaaatcaagggctgcttggccgtctcgtgtcaatttgatatattcggcaccttgagtcttcgctaatttaatacctaatctatctgtatcttgcttaatatcttcatagttagacgcaacttgtggcgctaaaatgattaattggtactctttcataatgtccatatgtgcgccatatccgccagctgccgctttcactggcacatgatattcttcagctgctttattaagtgcattggctaataatccacttgtaccaccaccggcacaaagtactaagacatttgtttgttctgtgatatttgaagctttagctgcatcgtctgatacaccacttgccgctaaaattgaatcagcttttttcgtatcaaagtttgctgcaactttttcttttaaatctgaattactttctttacgtccttcttcttcatcaagaatttcactatcataaacttttaggaatgggtagtaaataataatatctacaacaatcaaagtaatagctagaacgaatgaccataaaccaaaacctgtacccatgataatgcccaatggacctggtgttgtccaaggtaaattcacactaaaactattcattcctaacacttcaacgaaaagtttgaaaatccatacgttaacaattggtgctaatacaaatggaataaagaacacaggattcaatactagtggtgcaccaaataaaattggttcgtttacaccaaagaatgttggtacaactgatgcacgtccaatcgctttgtttcgtttagatttcgtcatccacataaacatgaacgggacgaccaatgttgcacccgtacctccaaaagtaacgataaacatttgtgtacctgatgtaataattttatctgcgtgttctccagcttgaagcaacttgaagttcgcttcgatattcgcatatgtaatggctgcaattgctggctctactattgatggaccatgaattcctacaaaccagaataatgcaaaggcaccaaagataattgtgacaccaatccatccatctgctgctgtaaataatggttcgaataattttaaaataccttccgctacatttgatttaaagctgttgcgaatgactaaatctaatgcataaagaatgatgattaccgctgaaaatggaattaagtccttaaatacttgtgaaatattcggcggtacttctttcggcattttaattgtaatattgcgcttcacacagaagttataaacaataacagttacaaatgctgataaaaatgctgttaataaacctttagttcccataaatgcacttaagaatccaccatctttggctggatcagaagctaagaacaagaatccacacatcgctgctagcattgtagaaataaagttaatttgatttgtactttctagcttacggttaaatgaatctgttaaagatttcgctgtcgttcctgctactaaaaatgctacaagccccatcgtatagttatatggtttcattaaaatggcttccatgcctttatcccatttaaaaccaaatatatttggcacgtatgcaattaatagaaagatacttgagaataagatgacaggcattgcagaaataaatccatcacggatggctcttaaatatatgttacgtgataatttctcgaaaaatggcttccctttttcaatttgtgcgatcaatttttgcatcattgtcatcaccctcttttataaaattctaataaatgcttcattaaatctttcagtaaaattgttgtcattaaatggtcttgaccatgcatcatcgttacactgtatgcaatatcatcaccttgtgcttctttagctaacaggcttgtttgtgctctatgcgcttcagcaatgcaattgtttccttcttcaatcaatgcatctgcttttgcaaaatctccagcttgagctgctgtcaatgcttctaaaaacttagaacgtgcatcccctgcaaatgcaacaatttcaaaacctaataattggacttcttctctattcatagcattaatccccttttatacttattttctttgtttccaagatgtcgcagtatcttttaatactttatttaagtcatcaatatttttgaaaccagttgtacgtaaccattcacgagcagcatcttcaccttgttcaatgtatacttgaacagcaccagaccatgtagcacggccacaaagtacaccgttgaatttagcaccagcttcgtgagcaaattttaaagtttcttggaataattccgcagaaacaccagcacttaagtaaatgtatggtaaatgagttgctgcatcttgatttttaaagtgttgtgccgcttcctcttttgtataaaccacttcaccttcagcaaagccttctacatacttcatgtttactggtacttcaactttcaatacatcaacattaaagcgtggttctgagaataatttcattgcttcgttaacctttctaggcttaacttttgcgaattcaacactaccgttatcaggaatgttgtcatcgtatgttaatacttctaagaagaaaggaatgtcttctgcaacacattctgaaccgattctttcaatgtatgctttcttttgaatgttaatttcttcagcatcatcaacatcatagtaaagtaagaatttaacagcatttgcaccttgttcttttaaacgttttgcagaccactctactaaacagtcaggtaaacgacctttagcatttacgtcataaccagttttttcataagctagcaataatccacaatctttgttacgtgcatcagatgctggtaaaccgtattctggatctaataaaattgaagatgcatattgtgttaattcttccgcaactaatacttttaattgttcaatttgagctacagttggctcttcagtttgatgttttgccatcatgcgttttaaagcaccacgttggtcaaatgctaatgcagaaatgataccttcgttattacttagttgttcaattgatgcgattttttgattcgattttgacattttttacacctctaaaacttcaatttgattgaataaatcatcataattatttaaattgacataacctgtttgtgcttcttgcgcattcagcatgcctaaagtattggctttttttagtaaatcgtggtcgttttcatgattgagaattgctgaagtaattccagcaactgtagaatcacctgaaccaaccggatttaatacgcttattgtcggaatattcactctatagaatgtatgattgtgcttagcgaatgcaccttgtgcacctaaagacacaataatccactcaatcccttcgaataagggttgtgacactgcctgtttcaaactttctaaactttcatcaagtggctggttaagcaattgatatagttcagaaatgtttggtttaatgactgttggtttgtatggattttccaaaactgtttgcaaagttgcacccgagcagtccaatatcacaggcacacctttgttttggcatcgttcaataatttgtgcataataatcttgatttaatcctttaggtaagctacctgaaatagcaactgcttcaactttttctaataattgttcaaaatgtttaataaatcctgcagcctcttgattatcaatctccggtccctgctctaaaatttctgtttgttgcccttcatgtaaaattgcaatgcagtttcgtgtttcacccttaatgttataaaatgcatgcttgatgtcggcatgatctaattttttagcaataaattgacctaattcaccgccaataaaaccactcgcaaggactggctcgcctacttgcgcaagtactcttgttacatttaaacctttaccaccagctgttttacttacttcttgaacacgattaacatcatctaatttcaatgctgttaatggatatgaaatatcaacggatggatttaatgttaaagttaaaatcatatgtgtcgtcccttaatcgtggtattcgcctctgtcccatttttctaagaattcatcaaagaaatgtggatcagcttgatctgcattgcttgtttctaaatgtttaattttagcgattaattttttattctcttcagttggtttatattcagcgttaataaatgcatcgataatatcgcacattaataactcaccaataatacgtccaccaaagccaatgacgttcgcatttaattcttctttagcatataacgctgatgtcatatcacgtactagtgctgaacgaacgccaggtactttatttacagcattgttaataccgacacctgttccacaaatacaaacacctaagtctgcattcccgctaacaacttgttcgccaacttttttaccaaaaattggataatgtgttcttgtgaaatcgtatgttcctacgtcaatgacttcatgtccttttgattttaaaaattcagatacacgcatttttgtatctgtaacaatatggtcgcatcctaatgcaatcttcatagtaatttttcctccttagcacattttattaagcatatctacgcggatttggtgtctaccaccatcgtatttaccttcaacaaaacctttaacgacatttttcgctaatgtgtctccaacaatttcagatcccatagtgatcattcttgaattgttatggcctctagtcatatatccagagcgttcatctgatacttcagcagcaatcatgcctttgatttttgtagcaaccataaagctacctgcaccaaatgcatcgataacaatacctaagttaccttcttgactttgaacatcttttgctacagccaaagttgcatcaacaaagtcaacttcctgtccttctgttacgtcaacaacatcatatttattgtctaataagtatgatttgatgacttcttttaatcgtttgccagcttcatctgaaccaataataatcgccataataagactcctttttactttaattttgaaatacctttcttaaaatatgacatgtttatttgtaggttatgaaaatcttgagaaaaggctttcaatttgattacgtttaaattataaacataaacaaacaataaatcaacataatatgtttataatctgtttgtttatgacatattttcaaacaataagtgaacattcatactgtggtgttgttttaattaggtattcgtctgaaattgtagtaaaactttgtcgaggttcccgttgacataaatttgcaaaaaaataacccataaatgaatgcaaattcacattcacttatgagcatatagacacatattttaacaatgcagttatatttttaatttagtcgactacttcaatatatgttttaatcgtttctactttttcttcatcttcatagtccatgaccactgcagtcaattcgtttaactgacaaaatgatgtaaaatcttctttgccaactttcgtatgatcgattaacaagtatttttcaattgaattacttagtgccaattgttgcgtataggcttcatctaatgtagatgtcatcacagcacctttatttactgcgttactactaaagaacatcttgctaaatcttagtttttccaacatggcattcgccatttcacctacaaatgcttctgtaatatggcgcatttcaccaccaattaaatagacacgaaaatgtgctgtttgtttttctaacaaaattttatacaccggcaaacaattcgtaataattgtgagcgtatgatgattgacttcttctgctaatagttccactgttgttcctggtccgaaaaacaaagtatccccatcttcaattaatgatgcagcttttctagctataaatcgtttttctgcaatttgacgggtatgtttttctttatgcgatatttctttatactgaaatgttgaattactgcgtgcaccaccatgaatcttcgttaaaatccctttattttccaattcaattaaatctcttcgaactgtcatatcagacacatttaaaccttcgacgatttcattcgttcttatcgtgccctttttattcactagtttagcaatttcgtccaaacgttcatgtttattcaatgtaaaattgcctcctttatttaggcgatgggtcattatcctttatgtttagacatcaattttaatatacatgcttattctataataaaaattgcgtaaaaactaatataatttaactgttcgattatatgtataattcatttttaaaaagaactgtttaaactgcgcttttgataatcgtaaaatgaatatactataataaaagcaaaagacgttataaatcattcattattttgatggggtgtttaatttggaaaatgatttagtgacattaaaacatattttagaccaatcgcatcgtattacattttttacaggtgctggtgtatctgtcgcaagtggcgttccagatttccgttcaatgggtggcttatttgatgaaatttcaaaagatggactttcgccagaatacttgttaagccgtgattatttagaagatgatcctgaaggttttatcaatttctgccataagcgtttactatttgtcgatacgaagcctaatatcgttcatgattggattgcaaaattagaacgtaatcaacaatctttaggtgtcatcacgcaaaatatcgatggtttgcactcagacgctggaagtcaacatgttgatgaattacatggcacgttaaatcgtttttattgtaatgcatgtcataaatcttatacgaagtcagatgttattgatagaactttgaaacattgtgataattgtggtggtgccattcgaccggacatcgtattatacggtgaaatgttagatcaacctaccatcataagggcattaaataaaattgaacatgctgacacccttgtcgtattaggttcgtcactcgttgtgcaacctgccgcaggattaatatcaaattttaaaggcgacaatttaattattatcaataaagatcgaacaccttatgatagcgacgctactttggtcatacatgacgacatggtttccgttgtaaaatcattaataacagagtaatcagtaggtaaaaagcatttccctgttactcgggaaatgcttttaattttggagttgcgtttttggaatttggagtttggaattcgacatttggaattccaaattaaaatgagtggaaaattttaattattgcgtgtttaatgacttggttttgtagcgatttttatttgatggattgtttttttgtttgatgttgggatgctacttttaatggtttgtcatttgtaagatttaaaataaacataaaacaagaaaaaaaataatagctgcgaatattaaaaaattagatatcttcgttatcaaattccgatattaaatcattatatttttcagaatatcttgcataatcttcattattattaaaagctagccatagacctctatcatcatataaatgatatattaagtttttagtattgttaattatatatatttcagaataattatcattctgattgatatttggaactaaccctttaaagtcttgattggatatagcttttaataattttttatgttttatatcttttatggaacacttatatgaaaactcctcgcacaaaatattatcatccttctcctttttatattctttaaagtaatacaattcatctattgttaacgatgtaaatttttttataacatttgttttcttataaggttcattataaacatatactacatgaaccaaatttatagaatcagaaggcgaaaacaaatcttcaaaaatgtttattgcattatcatatacagctaaaaaataagtattattgatagttttaccgtccttcaaaaactggtatttatcgccacttaaacttaaatgaattgcgttttttatctttctaaaattcaacttttttatatccaaattatttatatcaaagcacataatttacatcaccttattcccttaagattttttcttctttagttaaagaagctactctttttcctttgtcatttattaacttccaataagaaccacttaaccttttgagtaaatttaccaatactcaaccctttatcatttaacaaacttttattaatgtttttggctataatatgagtctttactgcttttaaattgtaaaaataatcgtcataaataatggcattttccgacattcaaatggtacaaagtacattgtcatatgcgtaatgatacctgtaattaatataataatagagaagtgtatatatgtcatatcgccacctgctatacaacttattagataattaattccaagacatattaattatctaattataaccttaggtaagttattgcataatataaaaatatataataacttatttgcttgctctattcacttttaagagtaataaaataacctgaaacatagactttaacatccaagttcaggttagcgtaatgtaaatgatttactttgttatattatgattaaacatctaattctctgcttgtaagtgctttaatcatctctggatcagcatgtgagaaaaattggctattactttcttctaatgtcgcaatttgttgtttatcttcttctgtaagttcaaaatcaaatatatctaagttttgagccatacgttctggattcactgattttgcgagtacaacgatgtcacgttctactaaccagcgtaaaataacttgtgcaattgatttgttatatttatctgcaatggcctgcaacaattgattttggaataattgatttttaccttctgcaaatggtgcccaagcttctaccacaacattttcttgttgaagtgctgcaacttgttcttcttgttgatggaatggattaatttctatttggttcacttgtggttgaatttgattgtgaatacctaaatctacaattcgatcaacgccgaagttagatacaccgattgctttaattttaccattttcttttaactcttctaatgcacgccatgagccatatacatcattataaggttggtgaataagcactagatcaagatagtctaaatttaatcgttgtaatgatcgttcgattgatttgatagtatcttcatagtttacattttcaatccatactttagtcgtaatgaatagttcacttctatcaatacctgaagcttcaataccttgacctacttcagtttcatttaaataactttgcgctgtatcaatatgtctatagcccgctttaattgcttctttaaccgcttctgctgtttgttcttgaggaatttgaaatactccgaagcctaatactggtatctttacatctttacttatttcaatatgattcataaaatgaacctcctttatcttgtaagtccactataaaccatggagcgaactctatagcaagccataggtttactttctctcccaaagacgttcaacattgtcatcatgattatcactagcattgattttagcaatatgattatcataattatcaattttatattgtagtaaatctctcgcatcatgaattgtctttaagttttcatttaattcttcgagttgcttatttaaaatttgcttttgctgtgcttgaatattttcatttttaggaagctgcgctaacctgcaaaattcgataagcgattcaatactgacgcctgcatttcgcaaatttttcactaaataaatccaatttaaatcactatcattatatattctatatccattttcatctcgattaacaggtggaatcacaccaaccttttcataatatcttaaagtgtcttgagatatattcatgagcgctacgacttctttagttttcattgcgactatcctttcagttatgttggtggcatcttaagtaatgttgctttatatattaccatcctcgtttgaatacctcttattttattactcaaatttaaatttgtctcttttttaacattttacatttcatcgtttttaattactttaaaaattgtataacttaaatatttaaaattatataatcactaagattgataatatttaattttttaaaaattattttcgttgcaatttttgggtgatgcggaaaatttgggtgatcgattgtttatatgcatcaacattctttgtggattgtttgacagtagacagtcatttgtatacgttaacgaattttgaaaaattgaatcattatttaatcataatattcattgcgcacgcgcaacacaaaaaggagacatgtcaatgacatatagaataaagaaatggcaaaaattatccaccattacgttattaatggctggtgtgattactttgaatggtggtgaattcagaagtattgataaatatcaaatcgctgtggctgatacgaatgttcaaacgccagattatgaaaagttgaggaacacatggctggacgttaactatggttatgataagtatgatgagaagaatgacgcaatgaagaagaagtttgaggctacggagaatgaggcaaagaaattacttagtgagatgaaaactgaaagtgataggaaatacttgtgggaaaactcaaaagatttagatacgaagtctgcggatatgactcgtacctatcgtaatattgagaaaatcgcagaagcgatgaagcataaagatactaagttaaaaatagatgaaaacaagaagaaagtgaaagatgcccttgagtggctgcataaaaatgcatatggaaaagaaccagataaaaaagttgctgatttgacctcaaactttaaaaataaaacttctagaaataccaatttaaattggtgggattatgaaattggaacacctagagcattaacaaatacccttatattgctgaatgatcaattttcaaatgacgaaaagaaaaaatacactgcccctatcaaaactttcgccccagaaagtgacaaaatattatcatcagtaggacaacctgaacaagctaaagggggaaatttagtagacattgctaaagtaaaacttttagaaagtattatcgaagaagataaagatataactaaaaattcaatagatgcatttaataaagtcttcacttacgttcaaagtaatgcaactggtaaagaacgtaatggattctataaagacggctcttatattgatcatcaagacgtcccatacactggtgcttatggcgttgtactcttagaggggatttctcaaatgatgccgatgataaaagaaacaccttttaatgataaaacccaaaatgatacaaccttaaagtcatggattgacgacggatttatgccactcatttataaaggtgaaatgatggatttatcaagaggtagagctatcagtcgtgaaaatgaaacgagtcatacagcgtcagcgactgtaatgaaatcattgttgagattgagtgatgccatggatgattcaacaaaagctaagtataagcaaatcgttaaaacttctgttaaatctgattcaagttacggccaaaatgatacattaagctcttattcggatataagcaaaatgaagtctttaatggaagacagcactatttctactaacggtttaacacaacaacttaaaatatataatgacatggatcgtgtcacctatcacaataaagacttagactttgcatttggtttaagtatgacgtcgaaaaacgtcgcacgttacgaaagtatcaacggagagaacttaaaaggttggcacactggtgctggaatgtcttatttatacaatagcgatgtgaaacactaccgtgataacttctgggcgacagctgatatgaaacgtttagcaggtacaacaactttagaaaatgaagaacctaaaggtacggatgttaaaaagtcgagtaaaacttttgtaggcggaacaaaattcgatgaccaacatgctagtatcggaatggattttgaaaatcaggacaaaactttaactgccaaaaaatcatatttcatattaaacgataaaattgtcttcttaggaactggcattaaaagtactgattcatcaaagaatccagttacaacgattgaaaatcgcaaagcgaatgggtatacgttatatacagacgataaacaaacaaccgcttccgataatcagggaaccaattccgtctttttagagtcaaccaataaacctaaaaacaatataggctatcattttttaaacgaatcgaaaataactgtaaaaaaagaaagtcatactggtaagtggagtgatataaataaaagtcaaaagcaagacagtaaaactaatcaatattatgaagtaactcaaaagcattctaatacagatagtaaatatgcatatgtgttgtatccaggcttatctaaagatgactttaatacaaaaaaagataaagtaactgtcgttaaacaagatgatgacttccacgttgtgaaagataatgaatcggtttgggctggtgttaattacagcgatagcactcaaacttttatcattaacaacactaaagtcgaagttaaagcaaaaggtatgtttatacttaaaaagaaagatgataaaacttatgaatgtagcttctataatcccgaatctacaaataccgcttcagatattgaatctaaaatttcaatgactggatactctattacaaacaaaaatacgtcgacttctaatgaatccggcgtgcgctttgaattacaacaaacattaaataaagatgataattaatgatttaaaattatagtaacatgatggtttattatatttcttttttcaaaatacacgagtcatatccctcgttaaaaactattactaaaaatcaaaaatataaaaaaatcaaaaagtatgttttaaactttatgaaacgtgttatacaaatagtataatatcctacaaaacaaaaaggagattgagttatgaaactaaaatcatttgttactgccactttagcattgggattattatcaacagtaggtgcagctttaccgagtcatgaagcatctgcagatagtaataacggttataaggaattgacaatggatgggaaacacactgtaccttacacgatctcagtagatggtattactgcattacatcgaacttactttgtttttccagaaaataaaaaggtactttatcaagaaattgacagtaaagtaaaaaatgaattagcttcacaacgtggtgttacaacagaaaaaattaataatgcgcaaactgcaacttatacacttactttgaatgatggtaataaaaaagtagtgaatctaaagaaaaatgacgacgctaaaaattcaattgatccaagtacaatcaaacagatacaaattgtagttaaataataatttgaaaatgaagaataattacatgaggcaaacgctgaaaaattgcgtttgtctttttagtatgaaatgaatgatcttgtcatatattgtttcttagttctcgtaccaataaaccagctatgcaattgtaaattctatattaatgtcttcctcaatttattatctaaacataacagcaaatctcaaatatctggaacctaaataaatcccctcactaccgctaatagtgaagggatttattttattgcttagacgtattcataaatatatttgttctattgtaatcatgcttaaccgtattaatcaaccttttatcattgctaaatttccaaatcgaaaattatgaagtcaatgtctcaattttcataaaccgtcattacatttccgcattcattattcagcttctctaatttcgtctgcaatatctttatagtcaatatttgcatttatgaaatccccatcatgtattggaaaatgctgttcaaatgtttctatattttggatttctaccttaacatcttctacttcaaaatctaagacatgtccaccaaaattacgatcatcatttgcaaagtgtacatggaatcctgctgatccgataccatggaataattctggtgtaaagaaaccaacgactgaacctttgacatacgtttcagtttgttcaggttgtcttctagctgaatcgattaaacgtgtataaggtggttcttgagccggcatcatacgtacatgcatttttttaaataagcctgaaatttttactgctgaaaataaattttcactcagcattttctccttaatttctgcaaaaactgcttcagaagatttatctttcgtttcatagctcgtatctgctacgaatttagttacagttgcatatggtgttaactcgtcaccttttaattccacaaattctttatgttcatttgcatgataggcttttccatctaaaaagatgacctcaccatttgaacctgttagtgtagcgatacctaggtcaccatgctgcaataattcatttattgatgcagttccttttaataatcctgccattaatgtgcctaatgtaccatgttgatataaaacactagccataaaatttcccactcctcattaacatttatctttgttttagttaaatacgtcaggtaacatatttgttgaaagtttgatattatctttgtaatttacaggtatatcaattaatactgggccatctgtttcatacccctctttaattgccgcttctaattcttcttgattagtaactcgtaaaccttttgcgccaaatgattcagcatattttacgaaatctacaggaccgaagtctacgcctgatgaacgtttatatttcatttcttcttggaattcaaccatgttatattttccatcgttccaaataagttgaataatgtttagatttttacgtacggctgtttctaaatcttgtgatgaaaataaaaagcctccatcgccagcaacggatacaacttgcgtattagggcgtacaagcgcagctgaaattgcccatggtaatgctacaccaagcgtttgcataccgttactaaataataaatgtcttggattgtaacttctgaaattacgtgccatccaaatatagtgactaccaacatcaactgtcactgttgtttcatcagttaataccttttgcatagattctataatttcaactgggtgtaagatgccttcttcatgagtcgctttaataccagtttcttgatcaatatgcgctcttaactgttctaattcatccaaatgttgttgatttataaatggttcatctactttgtcagaaatcatttcaatcgttttagcaatattaccaatcaactcttttttcggttgcatataattagtaatttcagcttgaacttcgtcaatattgattatttgcgtatctaattctttattccagttactagcttcgtattcaattggatcataaccgattgtaacaactaaatcacttttacgtaataattcatcaccaacttgattacggaataaacccactcgcccaaagaaatgattttctaattcacgactaatcacacccgcaccttggaatgtttctacaacgggtaaattggtacgctctactaatttgcgaatggcattcgtttcgtctgcacttgaacttctcattccagctaataaaacaggaaatgatgcatttttaatcgcttcaatgacgtcattaatatcttgttcacttggtactcctaaattaggtttctgacaaagtgatatcgccttagattcaacaggtgaagaaatcacatcttgcggaatactaataaaacttgcgccatttttccctgaagtagcaattcgaattgcatttgtcataacttctgataatgattcaggatcttgtacttcttcactatattttgatgaatattttaataaagcagcattatcaatactttgatgcgttaatcgtaataaatcattacgtttcacttggccacctaacgctaatacaggatccccttcagatgtagctgttaatagtccagtcgttaaattacttacaccagggccacttgtaacaagtactacacctggtttgcctgttaatcttccaataccttgcgccatcattgcggcgttttgttcatgacgcgtgacaataagttcaggaccatcatcaattaaagcattaaatagatagtctatctttgcacccggaataccaaaaacatattctaccccattatttttcaaagtatcaataaccatatcggctgcagtgtactttttatcagtcatttatattcatttcccttcaaatgtgatgtgtagaagtgtattacatgtaattacaatgtgatttgtaatctaatgatagttacgcaaaattaatgatatttatcaaaattttacatgtacgattagatttgtaatacataaaaattgtcttcagtacattatatatcctttgtaagatgaataaaaatcgttatttgtaatactaagtattccaaaaatgcatgagtagattttgtgcgttgtgataatgaagaatgtcggattgattggtgtggaggattgttagcatatttggggatgagctctttagtcaatgacggtttgaaattcttatttcgataaaaagccacagcaagacttagatctaactgtgacttatacatttcatacttatatttatcgatagtttttatagttataaattatagatgcagttcctaaaaaaattaagaagataatcattaagtatatagaaaagttatctgttttaatataaaacctaaaaagtagaaacaccagcatcgcaacaataaaataaacaggaataaaagctttcttccaaaatatagaatctttcaattaagtcactccttattttgataacacacttaaatgatggtttttgagttatcttccggtcgatgttttcatttattcttctgaggttgtattttttgaactgctaattatcatttttttattattcatccactcacctaatatttaccataaatacaaaattaacgagcttattagatataatagctcgttaaaataattatacgtttttttattctttacaacaattatgaatattttgattttccgttgaataaccatctataaatcctccacaaacatcacatttaggtattttatccaaaaatgtatgatatttatcagcaataacattttgtctttcagtaaggttattttcagatttttgtaaatagctaaaagattggtatactaaatcatattttttattatctattgcatctaaaactactctataataattacatatgtcatcaatagattttgatgattgtcttctcttccttgaaatctcttgaatatttctttcattgtcagttatatatttttcaaattctcccctatttttcaaatatttttcaagtaattctttatttttatgaagttccatagaaaattttgtaaatccaaataacgaagatgttttaaacctttgattcgcaccataaaaatatgatttacaacatatttgtaaatcattgtgaaagaatttgcaaaactcaataactttatttgttaaagattctaaatcttcatgacaataatcatctattatttttatcacattatatactcttgaaattacaaactcatcatcaactgctcctaacataggataaatattgtgatcttttatgtacataggaacaaaaaaataatcatatatgatctttgtttttttatttgaataagatgaggattgcccagacccatgagataatattgctctggctagacgagaggtaggtagcttatcattctcaataagctctttttcatcattagacaacgagactccttgttcattaattcttataaatgattcctttactttctcataatctccaattacccattgaataggaattgactttttggctataattgattttattcttttatactcctcattcttactactttttatctctttataattccctatgtttaaattaaaatattcagaaagagctttatcagatgtcatagaatttatatcatttttaccaaaatcatcatgaatccaagctataagagaacttactcgatgtccaccatcgataattaataagtcaccctcattagattcccacataataatagcaggtattaatccatcttctaaaaatgtctctaataacttttgaaccctttcaacagaccactcattagtatctctttgaaaatatggtttctttaattgggtataaaaaaatgcattatcttctaaatctgataatgtaaaacttgattttctttcagaaggtgtaatattttgttctcctacctcatcttctaactcaactctaggaattaaatgttctaaatgaacttttgtatttctttttaccattttgacttctacctcatttaatataatatttttaaattcatcttcatttatgtcttttgtcaaataatgtatttgtgcatcttgaattgataatatgtctttaataaaaaatttagtatatttatttatcaaatcaagaaaataatttaaagccgtccttttattcccatcagaaaaactatgaatattattatgtgaaataaataattcgattaaaaactctaattcagaactacaataaacttttttagcaaatgatgcttcataattactcttttctacaaaatttcctggttgaaaatccgaatgtctagtattaagaactcttccatgctcaacatattcctttaacaatctttcatttaaattcagtttggttttttcttcgaaatcttcaatttttaaatctttgtctatacttggatatcttttaggtcgatatactccctgatcatagctctttaaattttcgtatgcttttttttcattaaaagattgtattcgttcaaaaatccccatgattttaacacctacattttaattgaattggtagtccgcttttatatattttcacatttcaatatatattataattgtcgaatttttatattgatatgtcaatatttttaatcacttttcttgtaatgagatacaaacgctattggcgactataaaatattatggaatggcgaaatgactgttttcttacatttttcattttaaaattatataataatgtcccaactcaatcttcgatagagtgtcatttgttcgagacaaaaattttataagggagtgctcatttatttaacgaattttattaaaacaaatcatactgaacttgttagtcaatacgaatttaatccaagaacagctaatagataataagaagtagataaagatgatgaattagaatggttaaacaggagtaattaaacaaaacaaactaaaattccaaaagcaattatacgtgcagaaacaagtctcggtatagcttgcttagctaaattgagaagcaaaaaaaggaagttaagcaatgtttagttgcctaacttccgatattgaactcatcagtccaatttgacatagagccaataatttttaaaggttctccaccaaatgtggtgggtatataatttaaagaactatttttaaaatacaacttttagagtttttattattaggcggccagtccattattgggcttggttgtcttctttttttctcctttgtacaagctgaatcatcattatacgtgctttaaagttattgaaatttctgtaaccaaaagaaattcgcttgattaattttatcttattattaattccttctatagcaccattattaaatgctgggtaataaattgtatttcttaacatcctttgatgttttctataatatttaaccactttccatacacccttactcacagactttttactaactgaatttaaacgattaataaatttaggccaattacataaccttaggtcttttcgtaatccttggacaagttcgtaggagtgtcgtagtatatcgtcttttgaaagcatgaattctacaatgtcagatgagcgtttataagccttaaaagatttattccatctgtatttactaaatatggttttactagtatccatcaatagaactttccagttattcttaaaaattgtataattaggtccttttttattacggtattcattcataacttgtacacgatacttattaagttctctatttaaatgttgaacgatatggaatctgtcaaaaataatagctgcattaggaaataggtcgcgaaataatcggacatagggttcatacatgtcaatagtaaccgtcttaacttgttgtcgattttttaaatcgaatcgctcgaaataggcacgcaagaatcttgtagttctattttctaaaatatctataacatcatgagtatcattatctataaaaatgaaactcattgatccagttacatttttaacgcttttaaattcatccatagcgatgtgttctggcaaacaattaaagggtttaattcgtaatgaattagccgctttagttctaatacgacttacagtagatggagagatacagttatcttctgcagtatcaatctctgttttaactttagtagcttcttctataactttttgagtaacacatcttgagataaaacacgactcatcaacaattgacgttttagcagtaaaagtgccattgcattctaagcatttaaaacgttgtttagctaagttgaggtatgtgttatacccttgagttttaagtaaagtaatacgagaaacacgcttaccatgtttatgaatttgtccttcatttttaactccacaacaataacaggccgaaggcttatacgttagtacagcattaaccactgttgctttttttcctttgataatgacgtcaatttcttggtttatatattttatattttcatcttttattcttagtaattctaaggtatcattacacataggcgcacttgtctcctttagtttgggtttggtcactttaaattatagaggcaattgcgctttttgtgtattaaaaaaagcaggaagttttaccttcccaccataaaagatgaagaacctttttaaaaatacaaaaacgcaaaaaaacacctcgacataacatcgaggtgttttgtatatatcgtccgacaattaacgttttgagaattgaggtgaacgacgagctgctttaagacctggttttttacgttctttcatacgtgggtcacgagtaagtaatccagcgcgttttaaagaacctctgtattcaggatctgcttctaataatgcacgagcgattccgtgacggatagcttgagcttgtccagtgaaaccaccaccatgaacgttaactaaaacatcatagttacctttagtttcagttacatcaaatggttggtttaagtctaaaattaatgattcgaatggtaagtattcgcgtacgtcacggttattaactgtgatgttaccttcacctggtactaaacgtacacgtgctactgagtttttacgacggcctgtgcctctatattcaacttgtgccaaagtcatttcctccttctaattaaccacgtaattcgtagttttctggttgttgtgcagcgtgtggatgttcagcgccaccatatacaaataattttttaccttgtttttcgcctaaacgagtgcttggtaacatacctttaattgagttttcaattaaacgttctgggttagttcttcttaattcaccagcagtgattgatttgataccacctggatgatttgagtgacggtagtaaactttgtcagtttctttgttaccagtaaattcgatttttgatgcattaataacgattacataatcaccagtatcaacgtgtggtgtgtaagttactttatttttaccgcgtaagatagatgctacttctgatgataaacgacctaatgtttggccttcagcatcgataacataccatttgcgctcaatgtttgattcatttgccataaatgtttgacgcataataattgtcctcctaaaaaataaatgcttctattcaagctataaacagtttcataacctaatagatgatttcatttgtttcatttttaaaacgtttaatttcatttattttgttaactgttgttcgtttctgcttatatatcttgtaacacaataagtttccggggcttatcgtggggtggatataaaacaataccgttaataatcttataatttcacaagctttttgtcaatggcaatcagtcattttgtaatgattttttgcgatgtatttttatatcgttgccaaagtcttttaataactcattttcatctaaataaatcttctctaaatatagtccttcagccggtgcagtgaaaggaacattcttacgattctttgattcaagtagcttcggcacatcagaaatttcatgtcgcccttttccaacttctattaaaaatgcaactaagacacgcaccatgttatataaaaatccagatccagtgacaatataatcaaagccatcatctgtctttacgatttcactttggtataatgttctaactttgctttctacttcagttttttgcgaacaaaaccccgtaaaatcatgtgtacctatgaattgttgcgccgctctgttcattttgtctaaatccaacgtttcaggaataaatgttttcaaaccactttgaaatggatcgcggtgttgtgcttgatatactttatatcgatagcgtttaccgacacaatcgtaacgacaatgaaaatcgtcatcgactgtaactacattattgacataaatatcatctggtaacgttcggttcattgcatattgccattgtgacataggtatattcagctctgtgtcgaaatgaaagtactgctgtatcgcatgtacacctctatcagtcctacttgaaggatggattctcacatgtcttttatgcatgcgttgtaatagcttttcaaattgttgctgtaccgtacgtccattctgttgaatttgaaagcctagaaaattatttccttgatacgcaatttctactaatatacgcatgaatttacactcctgaatattttaatacgaataaaataattgcaattgggataatcatggttaaagatatcgtatctctcaattgccatttaagctgtctgtagctcgttctcttaacattggcatcataacccctaacttccattgcgaccgctaattcttcggcgcgttggaaagctgagatgaatagtggcactagtaatggaataaatgatttaatacgtgttgcaatgttccctgaacttatttcagaaccacgcgacttttgcgccaaaatgattttatctaactcatccattaacgtcgggatgaatcgtaacgcaatggacattatcatacttaattgatgaactggtaatttaaacatctttagtggcgcaagtaatctttcaaacgcatctgttaaatcaattggacttgtagatagtgtcataattgttgcaatcatcacaatcccaattaaacgcagtgatatatatagcccttctaaaataccattagtttcaatcgtgatgccatgccattcaactaatacatatccacctttagttaaaaatatatgcatcattaatgtgaagattaaaaagaaaaatattggcgttaaacctttgattaggaaccataattgaatttttgctaatctcataaagaataagataagtgcaaacacccaaagatatgttaatggtgaatgacagaaaaatattaatataataaaaagaaaaacaaacattaactttgctcttggatcaagataatgaacaaaagaattaattggtaaatatcgccctataatcaatttatttttcatgttgccactccttatacaagcttacaaatgcttcttcagttaaggcaatatcttttaattttgtttgatgtttttgttcaaagtcatattgtaactgaacaatttctggcaaaccaatatgccaatccgccaatttttctttatctttgaagagctcttttggtgatgtttgcgacactatactaccttctttcataacgatgacttcatctgcataacgcgcgacttcattcatatcatgtgaaattaggataattgccttattttcatctgtttgtagtgactttagtaatcgcattacttgtcgtttactttgtggatcaagtcctgctgtaggttcatcaaccacgataatatcaggattcattgctaatatcgatacaatcgctattttacgcatttgtccacctgacatttgaaatggtgattgtgacattacatctcttgaaaagcctaaatccatcaacagacgatgggcatagtttttagcttcatctaaattcattttaaagtttttaggtccaaatatcatttcacgctctactgtgtcctcaaataattgagattcggggaattgaaataccattccaattctttttcttacaggtctaatatatttatctttggtcttatgtgtaatagtaatgtcatcaactgtaactgtcccagtagttggctttaacagtgcattaatattttgtatcaatgttgatttaccactacctgtttgtccaacgatggcgtaatatttaccttgttcaaattctgtattaacatcatgaatagcttgatgctggtatggtgtccctttttgataggtataacttacattgtcaaagcgtatagtcatagttgatccaccagcccttcataagttaagaatgatgtttggtgtcccagcatttgatttattttgattgggaatggcaaatctagacctattcttgttaactcttctacatggtcgaaaatttcagtcgctgtgccttctttatagacagtccctttattcataacgataacatgatctgcttccatcgcctcagataaatcatgcgtaatagaaatgattgtaatattatgttctgatttaacttttctcactaaatccaataaattttgacgtgcatcaggatctaacatagaagtcgcctcatctaatataatgacagaggggttaagtgctaatacacttgctatagccacacgctgcttctgtccccccgataatgcattaggttcataatctgcacgttctaacatatcaacttgtttaagtgcttcgctgactcttctatgcatttcgtcatgtggaaccgcatgattttcgagtccaaatgccacatcgtattttacaattgaaccaacaaattgattatccggattctgaaatacaattcctatgtcttttcttaacttttcaaaattatcatcagttatagcttgattattataaaaaatttctccagatttaactttctctatgccaatcattaacttggcaattgtagattttccagaaccgttatgaccaacaatagatgtccactgacctttaggtatattaaaagaaacatctttcaatgtgaaggatgcatcactttgatattgaaatgaaacatttttaaatacaataactgaattcttatcctccacttgtctctctcctttacgattcgtgtatctatcatattttacaatatttataaatcgctgtatatgacattgactgggttctctatatattactagtattttctgactcatttctagtctttaaagtgttgtttaacaactaatgataaggacttttattcctctctaacaattatgtataaacgttaataaaataaatgatttactaatataggggtggtcgcgtttgattcaacgataatactttcacttcattcagttctagtgaaattgatcaaactagcttcatcatatttttagattcgcactcaaaaaagtaaatataaagaaatcggacttaaaaacatttctgttcataagtccgatatcttattcaataaaaaagcgcgcaccccatcataagtttgttgagttcacgctttaaatctttatttagttgatggggtactctgagctagacaatatttgtatgtggcaaacattatcgttgcactcatttgctttatataaaagtagttagtgtatttatataaattcttatactaattcgataattactgattcagcaccgtcaccgcgacgagggccttgtttaaggatacgagtgtaaccaccttgacgttctgtgtaacgctctgcgatttcaccaaataatttttgaagtgcagtttgtgtagtttcatcttcgtttaagatttcaacattacgtaaagttttagctgcattacgacgagaagctaaatctccttttttacctaaagtgattaatttctcaacaacactgcgaacttcttttgcacgagcttctgtagtttcaatacgttcactaataataagtgatgtagctaagtcacgtaacatagctttacgttgatcagaagtacgacctaattttctgtaacccatgagttaacctcctttatcaatcttcttttcttaatcctaatcctaaatcttctaatttgtatttaacttcttctaaagatttacgacctaaattacgcactttcatcatgtcagcttcagatttgtcagctaactcttgaacagaattgattcctgcgcgttttaagcagttatatgaacgtacagataagtctaattcttcaatagacatttctaatactttttctttttgatcttcttctttttcaatcatgatttcagcgttttgcgcttcatcagtaagaccaacgaagatattcaagtgttcagtcattatttttgctgctaatgaaactgattcttgtggtgtgattgaaccattagtccaaacatccaatgttaatttatcaaaatcactgctttgacctacacgtgtattttcaacagtatagttcacacgttcaacaggtgaatacaatgaatcaacagggattacaccaattggtaaatcactagtattattttgttctgctaatgcgtaacctctacccttgttagcaactagacgaatttttaagtgaccacctttagatactgttgcaattttaagctctgggtttaaaatttcaacatcactatcatgtgtaatgtcgcttgctgttacttcgccttcatcacgtacatcaatttctaaagttttatcttcttcagagtaaattttcaatgctaattgtttaatgttcataataattgtagaaacatcttcaactacattgtctactgctgagaattcatgtaaaactccctcaatttcaatatacttaacggctgcacctggtaatgaagatagtaggatacgacgtaaggagtttcctagtgtagtaccgtagccacgttctagtggttcaacaacgaacttaccgaatttagcatcttcactaatttcaattgtctcaattctaggtttttcgatttctatcatttaaatatcctccttatatacgtcgacttaatttaaaatgtttgctcagtgacctgtaacaataccatcataaattatacacgacgacgttttggtggacgacaaccgttatgaggtactggagtaacgtctctgatcgcagttacttctaaacctgcagattgtaatgcacgaatagctgattcacgacctggaccaggtcctttaactgttacttcaactgtttttaaaccatgctccatagctgatttagatgcagtttcagaagccatttgtgctgcaaatggtgttgattttttagatcctttgaatcctaatgcaccagctgatgaccatgataaagcattaccgaactcatcagtgatagttacaatagtgttgttgaatgttgaacggatgtgtgctacaccattttcaatattctttttcactctacgtttacgagatacttgtttacgtgccatttaaaatttgcctcctttacctattattttttcttgttagctaccgttttaactggtcctttacgagtacgcgcgttgtttttcgttttttgaccacgaactggtaaaccacgacggtgacggataccacggtatgatgaaatttccattaaacgtttgatatttaagttagtttcacgacgtaagtcaccttcgactttataaccgtctacaacttcacggatgcgacctaattcgtcatcagttaaatctttcacacgagtatcagctgatacgttagcttcttcaagaattttttgagcagttgacgtaccgataccgtatatataagttaatgagataactacgcgtttttcacgtggaatatctactcctgcaatacgtgccatattaatttacacctctcttttattaaccttgtctttgtttgtgttttggattttcacaaattaccattactttacctttacgtttaatgactttacatttttcgcaaataggttttactgatggtcttactttcatttttatacctccctatattatggagtgacgattatttataacgataagtaattcttccgcgtgttaaatcgtacggagacatctcaacagttactttgtcgccaggtagaatacgaatgtaattcattctgattttaccacttacgtgagctaaaatctcatgaccattttctaattctactttaaacattgcgttcggtaaagtatctaatacagtaccttctaattcaattacatcttgtttagccattgattaacttccccctttttgcaatagtaaggtaatcgtcaatagacaactttattgttacgaatctatcagtgattaattttataagttaaacaaaaattacgggaattaattatcgttaattgccactctcatctatctaatatgattaaatcatgcctcacttaaaatagaccgctaaaagttgatctattacaaatgatctaaaatatcaatgacatctttggtaacgtcgctaatatcttttgaaccatcaatatttttcaatacacctttttgatcatagaaatctaaaataggcttagattgtttaatattaacactcaaacgattagctaccgtttcaggattatcatcttctcgttgatacaatttaccaccatcgatatcacaaataccttcgaccttcggaggattaaatacaagatgatacgttgtaccacatgactcacagattcgacgacctgtaagacggttcattaattcttcttccggaacttcgatattgatgacagcatcaatgtttctgtcaagctcagacataatattatttaatgcctcagcttgctcgattgttcttgggaagccatctaataaaaagcctttttttgcatcgtcttcagaaattctttccttaacgatacctacagtcacttcatcaggaactaattcgccacggtccatataagacttagcttctttacctaattcagtttcttcttttatagcttttctgaacatgtcaccagttgaaatgtggggtattgggaatttcttgacaatttcacttgcttgagttcctttacctgcgccaggtaaacccatcaaaatgatattcataagtgccctcctaaaattatctaccaccaaagcctttatattctttttgagatacttgagcttctaaagatttcattgtttcaatcgctacaccaataacgataagtaaacttgtaccaccaatctgaattgattgtggtaatcccataaacttagttgctaatatcggtagaattgaaataacggctaagaagatagaacctacaaaagttaaacgatataaaactttagtaatatattttttggtttgttcaccaggtctaatacctggaacatagctaccttgtttcttaaggttatcagccattttttccggattaacttgtacaaatgcatagaagtatgtgaatagtataattagtacaatatatacaaccataccaacattacttgaaggatttgcagcattcgcaatgttttgtgcccattctttatctggatagaacaacgttaatgttctaggcagtaagaagaacgccattgcaaagattacaggaataacaccggctgagttcacttttaaaggtagataagttgcctgtgaacctaatctttgagcagtttgtttcttagcatattgaatcggaattttacgaacggcttcaagtacataaatagcacctacagttaatagtatcagtgacactaaaagtcctaatactttcaaccatgctaatgatgtatcttcttgcccaacgaacgcagtttgtccaaattgaattagactggctggcaacgttgataaaatacccgcaaatatgataatagaaataccattaccaacaccgaactgagtgatttgatcaccaagccatattaagaaagcagttcctgctgtcaaaactagtgctattaataaataactcataattgactgattgataatcagcgcacctttgagataattattaaattggaatgccatacctatagattggataaatgctaaagaaattgctaaataacgagtaacgttatttaactttcttctacctacttcaccttgttttgcccattctgagaatttagggacaatatccatttgtaataattgcattacgattgatgcagtgatgtagggtacaatacccattgcaaaaatagaaaatcgtttcaaggctccgccaccaaaagtatttaataactcagtggcaccttgagaaccttggggattatcaaaagctgcaggattcactcctggagctggtatataagtccctattttaaaaattactaacattgctagtgtgaagaaaatcttgttacgaacctcttttgttctaaagaagttcacaagggtttgaatcattagatcacctcgtgtgctccacctttagcatcaatagcttctgctgctgaagctgagaatttatgagctttcactgtcaatttcttatcaagtgaaccattacctagtattttgataccagatttttcattcttaacaacaccagattctactaataaagctggagttacttcagtaccatcttcaaatttattaagttggtctaagttaacaatagcatattctttacgatttatgttagtaaaaccacgttttggtaaacgacggaataatggtaattgaccaccttcaaatcctggtcttacaccaccgcctgaacgagctttttgacctttgtgtccgcgaccacttgttttaccgttacctgtcgcaacaccacgtccaacacgattgcgttctttacgtgaaccttctgccggttttaactcatgtaatttcatttcggcacctccttgattatttttcttctactgttactaagtgcttaactttgttgatttgcccacgaatagcagggttatcttcaacaactactgaactgttagtctttttaagacctaaagcttcaacagttttacgttgtgtttcaggacgaccaataacactacgagtgagggtaatttgtaatttagccataactagttttccctccttaattgtataattcttctactgttttgccacgtaatttcgcaacatcttcagcatttttaaggttttgtaaaccatcgattgtagcacgaaccatgttgattggtgtgtttgatcctaatgatttacttaagatatcagtgatacctgctaattcaagtacggcacgaacaggaccaccagcgataactcctgtaccaggtgcagccggtttcataaatacgcttcctgaaccgtaacggccagtaattgtgtgtggagttgtaccttcaacacgtggaacaactactaaatcttttttagctgcttcaacagcttttttgattgcttctggtacctcttgagctttaccagtaccgaaacctacacgaccatttttgtctccaactacaactaatgcagtgaaacggaaacgacgaccaccttttacaacttttgctacacggttgattgtaacaacgcgttcttcaaattctttcgtctcttcttctctacgagccatgtatttgtccctcctttaaattaaaattctaatccgctttctcttgctgcttcagctaatgctttaacacgtccgtgatataaatatcctccacggtcaaatacgatttctttaatgcctttgtcagcagcttttttagcaattgcttcaccgactttagttgctaattcaactttagttgctgtagtagcaatgtcgctgtcttttgaagaagcttgagctaatgttacgcctttattatcatcaataatttgagcgtagatatgcttgtttgaacgatatacgtttaaacgtggcttttcagctgtacctgataagttagtacgaacacgagcatgtctttttaaacgcactttatttttatcaattttactgatcatttcaatactcctttctttagagtttatctattatttaccagttttaccttctttacggcgaacgtattcaccttggtaacgaatacctttacctttgtaaggctctggaggtcttactgaacggatgttagatgctaatgctccaacttgttcttttgaaataccttcaactttaacgactgtgtttttctcaactgagaaagtaatgttttcttcagctttaatttctactgggtgagaataaccaacgttaaggattaagtctttaccttgcatttgagcacggtaacctacaccaacaagttcaagtacttttacgtatccttgagaaacaccttgtaccatattgtttaataaagcacgagttgtaccatggtttgttctatcttctttagaatcagatggtcttacaacttcaattgtgttttcttcttgtttgaatgtcattctttcatttaaagttcttgataattcacctttaggacctttaacagttacatgatttccatcaaaagttactgttacgtcactagggatgtcaataattttcttaccaacacgactcatgttatggcacctccttattttttattaccaaacgtatgcgataatttctccaccaacattacgttttcttgcttctttgtcagtgattacaccttcagaagttgatactaatgcaatacctaaaccatttaatactttaggcatttcgctagcttttgcataaacacgtaaacctggttttgaaatacgttttaatcctgtgataacacgctcatcgttttgaccatattttaagaataaacgaagtacaccttgtttatcatcttctacgtattcaacatttttaatgaaaccttcactctttaagatttcagcaatttcttttttaatatttgatgcaggtaattctaacttctcgtgacgcaccatgtttgcgtttcttacacgagtaagcatatctgcgattggatctgtcattgtcattgattgttgcctcctttcagactcttttttattaccagctagctttacgaacgccagggatttggcctttgtaagctaattcacggaaacaaatacggcataatttaaatttacgatatacagaatgtggacggccacaacgttcacaacgagtgtattcacgaactgcatatttttgttttttttgttgcttagcaaccattgaagttttagccacttaattagcctcctttaaataattatttacggaatggcataccgaagttagctaacaattcacgagcttcttcatcagtgttagcagtcgttacgataacaatatccattcctctaactttacttactttatcatagtcgatttctgggaaaattaattgttctttaacacctaaagtgtagttaccgcgtccgtcaaatgcttttttagaaacaccttggaagtcacgtacacgtggtaatgatactgaaattaatttgtctaagaattcatacattctttcaccgcgaagtgttactttcgcaccgattggcataccttcacgtaaacggaaagtcgcgattgattttttagctttagttactaatggtttttgaccagtgatcaattctaattcttcaacagcattgtctaatactttagaattttgtactgcgtcacctacacccatgttcacaacgattttatctatttttggtacttccattactgaactataattgaattttttcattaagttttcagtaacttcagtgttaaacttttcttttaaacggttcaaagtgggatcctcctttcaacttgttattaattattagatttaatttcttcgccagattttttagcgatacgaacttttttaccatcaacaaatttgtaacctacacgagttggttcgtttgttttagggtccaataattgtacattagaaacatggattgctgcctctgtttctaagattccaccttcaggatttaattgagttggtttttggtgttttttcataatgttaacaccttccacaacgacacggtcttttttaggtagagtagcaattactttaccttctttacctttgtctttacctgcgataactttaacgttgtcaccttttttgatatgcatgtgggcacctccttatttgtattggttgttattaattaaagtacttctggtgctaatgatacgattttcatgaagttaccttcacgtaattcacgagcaacaggtccgaagatacgagtaccacgtgggcctttgtcatcacggatgataacacatgcattttcatcaaatttgatgtatgaaccgtcattacgacgaacacctgacttagtacgtacgattacagctttgacaacgtcaccttttttaacaacgccacctggtgttgcatttttaacagtacatacgataacatcgccgatgtttgctgttttacgaccagatccacctaatactttgattgtaagaacttcacgagcaccagagttgtctgctactttcaagcgtgtttcttgttggatcattagttaaacctcccttatctctaaacttgtattaaataattactgactcttcaacaatctctactaaacgaaaacgttttgttgctgataaaggacgagtttcttgaattttaacaatgtctcctaatttagctgaattgttttcatcatgagttttgtattttttagagtattttactcgtttaccgtataatttgtgtgttttgtaagtttcaacaagtactgtaatagtcttgtccattttgtctgaaacaactttacctacataaactttacgatcgtttctttcgctcacttttgtaacctcctcttacttaattattgattagccttactttgttcaatttctctttcacgagcaacagtttttagacgtgcaatcgtttttcttactgtacgaatacgtgcagtttcttctaattgacctgtagctaactgaaagcgtaggttaaaaagctcttcttttgaagatttgatttgttcttcgatttctgaagtggttaagtctctaatttccttagctttcatttgtttcaccacccaattcctcacgttttacaaacttagtttttactggaagtttgtgacttgctaaacgtagtgcttcacgcgcaacttcttcagaaacgccagcaacttcgaataaaattctacctggtttaacaactgcgatccagccttcaaccgcacctttaccagcacccatacgtacttctaaaggttttttagtatatggtgtatgtgggaagattttaatccaaactttcccgccacgtttcatgtaacgtgtcattgctatacgagcagattcgatttgacgagatgtgatccaagacgttgttgtagcttgtaaaccaaactcaccaaatgttacgtagttaccgcctttagaacgaccagttgttttaggacgatgttgacgacgatattttacacgttttggtagtaacattattattttcctcctccactagtgttcttagtaggaagaacttctccacgatagatccatactttaacgcctaatttaccgtaagtagtgtcagcttcagcgtgtgcataatcgatgtcagcacgtaacgtatgaagtggaacagttccttctgaatattgttcagcacgagcgatgtcagctccgcctaaacgaccagatacttgagttttgatacctttagcaccaagtttcatagctctagtgattgcttgtttttgtacacgacggaatgaagcacggttttctaattgacgtgcgatgttttcagctactaaacgagcgtcaagatcaacttttttgatttcaattacgttgatgtgtacttttttatcagttaacgcatttaatttgttgcgtaatttttcgatttctgaaccgcctttaccaattaccataccaggtttaccagtatgaattgcaatgttgatacggtttgcagcacgttcaatctctacgtgagaaactgatgcttcttttaattcattatcaataaatttacggatttttaaatcttcgtgtaaaagtgaagcgaagtctttttcagcataccatttagcttcccaatcacggataataccaacacgaagtccgattggattaattttttgacccacagtattccctccttaaaagttaattaagcttctttagcttcttctttaccgtcacttacgacgattgtaatgtggcttgtacgtttgttaatcgcacttgcacgaccttgcgcacgtggacggaaacgttttaatgttggtccttcgttagcatatgcttctttaactactaattcatctgtgttcatgtcatagttatgttcagcattagctaaagcggacattaatactttttcaattactggtgatgaagctttgtttgttaattttaaaattgcaatagcttcagcagcatttttacctctgattaagtcaagaactagtcttactttacgaggtgcgattcttattgttctagcaaccgcttttgcttccattaggatgtcctcctctacttaatagatattatcttcttgttttcttgtcgtctgcaacgtgtcctttgaatgtacgagtaggagcaaactcacctaatttatgacctaccatatcttcagttacatatacaggtacgtgtttacgtccgtcgtatactgcaaaagtatgtccgatgaaattagggaaaattgtagaacgacgtgaccatgttttgattacttgtttcttttcgcttccttcttgagcttcaacttttttcattaaatgctcatcgacgaaaggtccttttttaatactacgagccatttgggcgcctcccttcttattatgtgcgtgcagctttaagccgcacacccaaataagttgattatattattttttcttacgtccacgaacgataagtttgtctgatgattttttaccacgacgagttttcttaccaagcgtaggtttaccccatggtgacattggagatggtctaccgataggagcacgaccttcaccaccaccgtgtgggtgatcgttagggttcattacagaaccacgaactgttggacggatacctttccatcttgaacgtccggctttaccaacgttaactaattcgtgttgtaggttaccaacttgaccgattgtagcacggcaagtagataagatcatacgaacttcaccagatcttaatctgattaatacgtatttaccttctttaccaagtacttgagcacttgcaccagctgaacgagcgatttgtccacctttaccaggtttaagctcgatgttgtgtactactgtaccaactggaatgttttgtaatggtaatgcgttaccaactttgatgtcagcttcagcaccactttcaacgatttgacctacttctaatcctttaggagcaatgatatatcgtttttcaccgtctgcatatacaactaaagcgatgtttgctgagcggtttggatcatattgaatagaatcaacttttgcattgataccatctttgttacgtttgaaatcgataacacggtattgacgtttgtgtccaccaccatggtgtcttacagtcaatttaccttggttgttacgtcccgcttttttcggtagcggttttaataatgacttttcaggtgtagttttcgtgatttctgcgaaatctaacgaagtcatattacgacgaccatttgttattggcttatactttttaatagccattgtcgcttacctccttaatggtaattgttttattagttaaataagtcgattgatccttctttaagagttacaatcgcttttcttcttttgtttgtatagccttggtaacggcccatacgttttttcttaggtttgtaattcatgatattaacacttgcaacttttacgttgaagatttcttcaacagccatttttacttgtgttttgttaacacgagtatcaacgtcgaaagtgtatttgtcttcagccattgcttcagaagatttctcagtgattacggggcgcttaagaatatctcttgcttccattatccgagcacctcctcaacttttttagcagcagcttcagtaattactaagctgtcagcattagtgatatctaaaacatttaaaccttgagcagttgtcacttgaacgccagggatgttgcgtgctgataattcaacatttacatcttcgttttcagtaactactaatacttttttaggttgttctaatgtagataatacatttttgaattctttagtttttggagcttcgaagttgaatgcgtcaactacagttaagccattctcttgagctttgaaagataatgctgagcgtaaagctaaacgacgcattttcttaggcattttgtatgcataacttcttggagttggtccgaatacgataccaccgccacgccattgtggagcacggattgtaccttgacgagcacgacctgttcctttttgcttccatggtttacgtccgccaccgcttactgctgaacgattcttaacagcatgcgtaccttgacgtaatgaagcacgttgtaaattaatagcttcgaataaaacgctattatttggctcaataccgaatactgcatcgcttaattcgattgaacctgatttagttccgtctaattttaaaacatcataattagccattatgcatttcctcctttcacttcttattatttattaccttttttaattgaagttctgatttctactaaaccttttttaggtccaggtacgttaccttttactaagataactttgttttctgtgtcaacttgaactacttctaagttttgaacagttacagtgtttccacccatacgtcctggcattttttggcctttaaatactctagaagcatctgaagccatacctacagaacctggtgctctgtggaaatgagaaccgtgtgacataggtccacgagattgtccgtggcgtttaattgcaccttggaaacctttaccttttgatacgcctgttacgtcaataacgtcgccagctacaaaagtatctactgagacttcttgacctacttcgtaagcatccacgtctacattgcggaattcacgaatgaagcgcttaggtgctgcgtcagcttttttagcgtgaccttcagctggtttattagcatatttattagattttgcatcttttttgtatgcttttttgtcttcaaatccaacttggattgcgttgtatccatcaacttctacagttttcttttgtaatacaacattttctttagcttctactactgttacagggattaattcaccgttttctccgaatacttgtgtcatcccaatttttcttcctaagattcctttggtcatcgaaagtccacctcctaaaattgtctattataatttgatttcgatgtctacaccagatggtaagtttaagcccattaaagcgtcaactgtttttggtgttgggtttacaatatcgattaaacgtttgtgtgtacgttgttcgaattgttcacgtgaatctttatacttatgcacggcacggatgattgtgtaaactgatttctcagttggtaacggaattggtccagaaacatctgcaccagaacgtttcgctgtttctacaatcttctctgctgattgatcaatcacgcggtgatcataagcttttaatctgattctgattttttgttttgccataattttccctccttattcgtctacatttagtgatagacttctccacgaaaactatcttacacagcgccatggcaaagcggccgggtgtgtcagtaacctttcgcttcatcgcttttcttaaagtccaacgttagttatattacacgaaaaacatcgataaatcaaggcttttcacataatttttctatctgtctaacacatacttttatattttactttatatacttagtcagttcaactattttcgagatattttttatttccttctttattgtaaattcgtaccttgaatcattttattattatcattgaaaattattctatataattagtcataagaacggtggtgaatgaatatgaaaaatggaccaaaattatctttagcacttataggtatctttttaatactttgtgagtttttctatggcattccttttttaggtgcaacgtttattttaagttttggatggcagcctttaatctttaatgcattactttatctaattcttactattatattattagtgaatagacaaaatgcgattagacctatagcgattattccaatatttggtatagtaggtagttttttagctatcatccccttcttaggaattttgattcattggattttatttttcctaatgattctatttgtcctagttgtattatcagcgccaacctatatacctaataaaaatgctcgtgtcatttacacacaatacaaagatggacatagagaataattcttaaaacctttttaattaggtatataatatagaagaaacacgtccaacaattttaaaagaagtatatttatatcggatatttaaagacattcataatattgctttatgttatttcgcttcttattttatccttacttcaaagaaaaaacgactaccaatcattggcagtcgttttttgtgtctggatttaaccatgaacaaatatgaagtacagaatgaatagtaccattaatacatacattatcggatgtacttctttatgttttttagagataagcattgtaattggatagaaaataaatccacacgcaataccagttgcaattgagtatgataaaggcatcataatgattgtaatgaatgctggcactgcaacttcaaaacttttccagtttatctcagcaaagtttgcagccattaatacacctaccaccactaaagctggtgtcgtaactgcacttgttacaacagcgattaacggactaaagaacagcgctaataggaaacaacaacctgttacgatactagcaaatcctgttctagcacctacagcaacacctgaagttgattcgatataagaagttgttgtagttgttccaaaaactgatcctacaatcgtagctaaagaatctgagaacaatgctctaccagctcttggtaatttattatctttcataatacctgcttgagtagcaacagctactaatgtaccagctgtatcaaagaaatcaataaataagaacgttaaaataacaattaagaactgtatcgttaataattgacttgggtctttaaacgcttcaaatgcagcaccgaacgttggttcaatacttggaatcttacctacaataccagatggcatttgaatcaatccagtgaacataccaacgattgctgtgatgatcataccgataaagatagaacccggcaatttaattgcatataaaataactgtaataacgataccgaatatcgccaaaagtactggtggatcagttaaatgtcccaatgttactaatgtagattcatttttaactataatacccgaactttgtaaacctacaaatgtaatgaataatcctatacctgctgaaacagccatcttcatttgataaggaattgcattaataataacttccctaaaccctgtgacggttaatatcgcaaagaatatacctgagaataaaacgcctgttaaaccaacttgccaaggaatacccatggttaacacaacagtaaatgcaaagaatgcatttaatcccatacctggtgctaacgcaattggatatttagctattagtcccatgaatagcgagcctacaaatgctgctaatgcagtcgctacaaaaatggcaccttggtccattttcatatcttctgatacgcctttaacacctgctaaacttaaaacttgcgggttaactgctaaaatataggccatagataagaaagttgtgataccgcctaagatttctcttttaaagtttgttccatatttatcgaactggaaatagtttttcacgaatggatgctcctttttttaaaataccttaatagtttaatatcattcttaataaaaaacaataccaaaagcgaacttttcatttttctgatttaactttgttcgattttatctataaattcaagttctttaatgcatctttaaacggattattgtctaaaccttcatttttattcatatactttttcatttctttacgagatactttaccagaggatttagacttcatacgctgatccatatgtgcttgcgtttcagaatgtccacaaacacaacgatataccgcttctttccctttaccaaacaacgttaatttctttttacagtttggacatcttgcatttgttttgcgctgtacattctttttcgtcttacaagatggatcttggcacacaagcatctgaccatttttagttttaactttaatcatgaatttaccacacgttgggcattctgtggttgttaaattatcgtgtttatatttacgatcactatttttaatcccatttacaacatctttcgtaaaatctttcatttcattaataaatgttttcgcctgatatttaccacgttcaattaaaagtaatttttcttcccattgtgcagttaaaagtggcgacgttaattcttctggtgctaattctaatatttgtttaccttttgacgttactttaattttaccgtctcttgattcaatggcattcatattaaataatttatcgataatgtcggcccttgttgcaactgtgccgataccacctgtttgttttaaagtttgcgcatattttttatccttcaattgaataaagttctgagggttctccatcgcttttaataacgaaccttcattaaaatattctggaggtgttgtttcatgttctctaatgtttgtttttgaaatcttcacttcatcgccttctgaaaaaggctgttgcatctctgtaatagattcaccttgtctaatagatttaaaacctaaaacagttgttacattctctttcaaaacaaatgtgtgccctgcaacctctaaagttacagttatcgcgtcatactcgtgcggaggcattaaagcttctaaaaaacgctcgacaatcatatcgtataactttaattctctattacttaagtctgacatgacaggtctcacttctgtaggaataattgcatggtgatcagatactttttgattattaaatatcgacatttttgatgaaaatgttttagacattaatgggcgtgcttggtctttatatgttgttgccatcgtcgcctgaatacgttctttcatagtatctaccatatcagttgttaaatagtttgaatctgttcttggataggttacgactttatgtctctcatataagctttgaagtgtattcaatgtttctttaggtccaattttataacgtctatacatatcttgttgtaaatctgttaaattgtacagtgattgcggatacgacttcttatgtttagtagcaacagatttaatcttaccatcgacatttttcaaattattaactatctgttctaaagtttctttattggtatatcgctgatttgattctagctgaaaatcaaacccttttaccgttaatgataatgtatagtattgttgtggtttgaactgattaatctcttgttgccgtgtatttactaattgaatcgttggtgtctgaacacgtcccagggatagctgtgcatcatactttgttgttagtgcacgcgttgcattaatcccaacaatccaatctgcctcacttctcgctaacgctgcataatacaaatcgttatattgacgcccgtcttttaaatttttaaaaccttgttgaatagcttttttagtaactgagctaatccataatcgacggattggctttttgttaccaactttatccaaaatcaatcttgcaactagttcaccttctcgtccagcatctgttgcaataataatatctttcactttattatctaaaattaacgcttttactgttttaaattgtttgcttgttttaccaataacaacagttttcatatatttaggtataattggaaggtcttctaatcgccattcctttaaatttttatcgtattgttcaggtgtcgcatttgtcactagatgacctaacgcccacgtgacaatatattggttattttcaaagtaaccattacgcttctgatttatttgtaaagcatcagcaatatctcttgcgactgatggtttttcagctaatattaaagatttcataaattatcctttctcatacgttcttttatttcgaacgtgcttcatctattccactaatctttgatttaaattcaatgattgcaaatgatgtgttaaatgtattgtaacatgttaatatcactattaactttcatttcagttgaaatactatataataaaagtaacaaaaagtacggaggtaatgacatgagcatagttcagttatatgatattacacaaataaaatcgttcattgaacattcgaattatgaatcagcatcatacttatataaacttcctcaacagtacaatgaaatagatgtattaataaccgatgcgattgaatcacctggtgtattttcgattaaagaaaacgattcaatcaaagcaatcatattgtcttttgcatacgataaaaataaattcaaagtcataggccctttcgtggctgacaattatgtattatctgtcgatacgtttgaaacgctatttaaagcaatgacttcgaaccaacctgacgatgccgtctttaacttttcttttgaagaaggcattcaacaatacaaaccattaatgaaagttattcaagcaagttataacttcactgactattacatagaagcccgtacaagattagaagaagatatgcaccaaccaaatatcattccttatcacaaagggttttatcgtgctttcagcaaattacacacaactacatttaaatatcaggcacagtcaccacaagatatcattgatagtttagacgaccatcatcatttgtttttatttgttagcgaaggtttacttaaaggttatttataccttgaaattgattcacaacagtcaatcgccgagattaaatacttcagctctcatgtagattaccgtttgaaaggtatcgctttcgagttgcttgcgtatgcattgcaatatgcttttgataattttgatattagaaaagtttattttaaaattcgtaataaaaataataaactcatcgaacgatttaatggtctaggtttccatatcaactatgagtacattaaattcaaattcgaatcacgtaacgtaaaaaatcaaacaatccctgaataaaataccaagcaaataccccacagtacatcattagcatgtattgtgggtttttctactttttgtaaatattgaaaattataagtagttgttttttactattagggcagaatgctttacaataacatgcaagtgtcaattaaggggagcacttgcaaaaatagtataggagagtgagtagtcttgcaatttcttgatttcttaatcgcacttttacctgctttattctggggaagtgtcgttcttattaatgtgttcgtcggcggtggaccttacaaccaaattcgtggtacgacgctaggcgcactcattgttggattaggtttacttattactggtttcgcaaaattcaataatcttactgtaattattgtcggtcttatttctggtgcattatgggcgtttggacaagcgaatcagcttaaatctattagtttaatcggtgtatcaaatactatgccagtttctacaggtatgcaattagttggtacaacattattcagcgttatctttttaggtgaatggtcttcaatgactcaaattatctttggtttaatcgccatgatattattagttactggtgtagcacttacttcacttaaagctaaaaatgaacgtcaatcagataatcctgaatttaaaaaagcaatgggtattttaattgtatctacagttggatatgtaggtttcgttgtacttggtgacatctttggtgttggtggaactgatgcattgttcttccaatctgtcggtatggcaattggtggctttatcctatccatgaatcataaaacatcacttaaatcaacagcacttaatctattgccaggtgtgatttggggaattggtaacttgttcatgttctattctcaaccaaaagttggtgtagctacaagtttctcattatcacagttacttgttatcgtttcaacattaggtggtattttcattttaggagaaagaaaagatcgtcgtcagatgacgggtatttgggcaggtattattattatcgtgatagctgctataattctaggtaatttgaaatagaaagttaaatactcatgtaacgtaaaaatgtaatcacttctgaaaataaccattcacttatagaatgattaaaattaattttcgggaattttacgttgaatgttcctctatatgtcctaggaaatacgtggctctaaaaacaaaacgcaataacacatcatgacattaatcatgcgttttaagactttaaaattagcgatacttttaaaatcttgatgatattcatatatcaagtatgcgccatacatatgaagtggatagctgcatagggagtgggacagaaatgatattttcgcaaaatatatttcgtcgtcccaccccaactcgcattgcctgtagaatttcttttcgaaattctctgtgttggggcccacaccccaacttgcacattattgtaagctgacttttcgtcagcttctgtgttggggcccctgactagaattgaaaaaagcttgttacaagcgcattttcgttcagtcaactactgccaatataacttcgttgagtatagaatattgatttatgtcccagcctgttgaacaactatgtcataaataaaagcccccttttcacaatatacatttacatattgtggtaaagggggctctcattttctacgaatactaaaatggattttattttcaaatgtgtaaactagacaaacactgcctgatacacgtacaaaataatgatactaataatgattgtcaaattggtcgtcatacctataaatggcagtgttcgatatttaaactgaataccataagaaataattgcaacacctaccgggaacatccaagtgaccaacaatgtcgtcttaatcatatcatctgatactggtaacaacacatatactaacaatcccgcaactaatgctaatccataatgcaaacataaatatttaatagtagcaggtatatactttctttccagagtaaaattcaacatgacacctagcaaaatcattgataacggcatatttgcatgggaaagtatgctaaagaaatcgattgccacatgtggtaaatggatgtgacttatattcaatataaacattacaatgtatgtaacgagtggcactgattgtaataatttcttacctaaatatttaaaatcgaattgatcactaccttcactaaagtagctacctacaaagtaagtaattccaaacatcacaaaggcaccacctatatcagccataccaaaataaataagtcccgttttaggccatatcacttcaattagtggatatgcaaacaatccaatattcatagcaccagtcatcatacctactgatccacgcatgtgattatcatattttctaaaaaaccagacagcaatcattttcgccacaataccatatataatcattaaaattggtaaaatggagaatgacaattttaattctgcactgtttaaattcacaataactaaagatgggagtgtgacattaagaactaatgtagcaatgacttgactatctgttgcttttataaaattaatgcgcttcaaaaagtaaccaagcgcaattaataaaataatcatagtaaattgttctgtcactgttatcccttctttcaataatcttcataatttataactttaacatactccacagatattttagaagtctactgtttcatgctataatctacattaaatgcacttaattatatttcaaaggagtgttatagtatgtctttagaaaaccaactagccgaacttaaatatgattatgttcgtcttcaaggtgacttagaaaaacgggaatctttgaatttagatacttccgcacttgttcgtcaacttaaagatattgaaaatgaaattagaaacgttcgtgctcaaatgcaagattaataatctatcattcaagcaataaatgctttttgttacataaatttgactagcattgctctgaatacgttatattgatgaattgcttcatttttcgctcaattacatctagaatcacaagatgttgtcgtgttatgatttagtgtttcattaacaacatacacgcatatctatcccaacactgctatttatgttttctacgctgctgtactacatgaaccctttgaaacggagaggaagttatcatatgcaattttatctgattttactagcaatactttatctaattgttagttttattagtatttttaaaatggaagttgtatttactcgcattttgagaattattatgggtgtgttgttattattcgtcttagcattaacgacgatgagttttccaaaagagaattggtgggtatttatcgtcttattactcttagtcggtaatgtcgaagtgacaggatttaaaatgcttaaaaaagatctaaaaggcgtaaacatcttgaatttaatgtcattatttatctttgtcatatatttcatcttaaccatcgtattattctaagtaataaacaaaatatgcaataacataattgcaaccttattttattatcggattacatgttgaatgccagtattgttttattaacacatcgattaaatcgcacgtgaaataaggtctaaaatttcaaattttaaaaagccataaaagtagtcaatatcatgaccgcttttatggcttttatattatctatcgtttagtgaatcgtttttttaaagtaaagagaatttcatatattactggtacaactacaagtgttaataaagttgatgaaattaaaccaccaataactgtagcagctaatcctttcgaaataagaatcgagctatcttgaccaaataacaaaggaactaatgcaccaattgttgcaatcgccgtcattaatatcggtctaattctagtaccgcctgcttcgattaatgcttctttcatctccatgccctgttgctcattattaataacacggtctattaacacaatggcatttgttactacgattccaattaacattagcataccaattaaacttggtactgatattgtttctcctgtgattaatagtgcaataattacaccgataactgtaaatggtatagagaataaaattgtaaatggtgctaggccacctttaaatgtaataactaggattaaatatacgataatgattgcagctaacattgcaaaggctaattgtgtcattgcattgttaatatcatctgatgcaccaccgatattaacctttacattattcggtttgtccaaattatttattttagacatcacttgtcgtgttgtgccacccacatctttatttgttactttagcagataccgtcgttgcataatctccttgttcttgcgtcaatttacttggtgtcgttgttttaactaacgtagcgatatctcccaatttaatcgtaccaccagtcggctttttcaaagttatattattcaacttatcttctgaccagtctgtttgcttattttgtttgactttaacatcaacagttttaccattttctttaacagtcgtaactgttttttctggtaagttttcattcaagtgcattgcaagttgacttgcagaaataccattttctgccgctttattttgatcgactttaatttcatactgatcatatgtttgcgataaatcagatttgacattggctagtcctttaacctgtttcattttctgttcaatatcttttacagttgattttatggcatccattgatggaccttttacagtaacctctacagatttattacctgcacctgttcctaaatcttgatttttccactctccaggatgtttaaagccatctgcatgtttaataaccttatccgcttctacatcaaaattaggcgtgtcattatcatattcaaccatgattgccatactatttgtactacccgttggatctactggactactaccgccaactgagtattgaattgtttttacatgctttttctgttttaaatatttttcaacatctttcgcatgattcaacactgcttgctccgtttcaccaggcttcggtgtataagtaatagctaaaaatttatcgtcacctgctgaaataaagctagtgcctagtctcggtcctccaaatacaatagttgcaaccaaaattaatgtacttaatataattacaatccacttatgatttaatgaccaatgtaatacttttttataagttgtactaacaacacctaatccttcttgatgttgtttattacgacgtttaacgccttttttaaatagtgtagctgccaacgctggaacgagtgtaattgacactaataacgatgctaataaactaaatgcaatagccaatgcaaaaggtctaaacatttcgcctactgaacctgatacaaacacaagtggtaagaagacgataatagtaactagtgtcgatgacattattggtttaaatacttcagttgtcgcactgataattaaattttcaccttttagttgttcttctgaatctgttaagcgtcgataaatattttcaacaactacaatcgaatcgtctatcacacgtccaatcgctactgttaatgcacctaacgttagtatattcaatgaaacatcactcaatttcagagcaataagcgccataagaagtgataacggaatcgatataatagaaattgccgtcgtacgaatgtttcttaaaaacagcaaaataactataattgccacgattgtacctaatgatgctttttcaaccatcgtataaagtgatttctcaacaggctttgcagtatccattgtttttgtgacattaaaatctttattttcatcaacgaatgtatcaattttacgttgtacatctttggctacttgaactgtattggcatcttgagctttagttatttgtaaattaaccgcatccttgccattcgttttagaaatagaagtacgcacatcaccaactgtaatatcagctaaatctcctagtttcgctgtcggcataccacttatattatttgatgctgacgcttttgaattttgctgcggtgatgcctgattaacatctgacatggctgaattttgtttattgtcactttgggattgagattgcccttgtcctcctgccaacgttaatggaatatttatgtttttaaaagcatcaacagattgatattgaccatcaacaacaattgatttatctttatcaccaaattggaacaatccaagtggtgttgttcttgttgccgtttttagatagttttctacatcatcagcagtcaatccatatttttcaagttcattttgcttaaatttaagggtgatttcacggttcgtctgcccatttaattgcgcattttgcacaccatctaccgtttgtaattttggtattaattgttcattcagtactttcgttacttttttcaagtcattctctttatttgaaaatgaatatgctaaaaccggaaaagcatccatcgaattacgtcttaattctggttgaccaacttcatctttaaatttaattttatcgatttcttttttaagctgttcttctgctttatccatatctgtattattttcatattcaactgttacaattgaagcattttgtatggattgcgttttaacatttttcacatatgccaacgatcttacttgattgtcaattttactacttatttcatcttgggtactttgtggcgttgcacccggcattgttgttgtaactgaaataactggattttgtacatttggtagtaattctaatttcaatttagcactcgcgtatacaccgcccaagacaactaaaacaaccattaaaaagatagcaaacttattccccaaagaaaattgtaatagtttttttatcacagtacttccccctctttcactatattcaaaaatattttactcaaccattctatattgtgtaaaaaaatctgaacgcaaatgacagtcttatgagcgttcagatttcagtcgttaatctattttcgttttaatttacgagatattttaattttagcttttgttaaacgcggtttaacttgctcaattaattggtacaatggctgattcaatacataatcaaattcaccaatcttttcacttaagtatgttccccacacttttttaaatgcccataagccataatgttctgagtctttatctggatcattatctgtaccaccgaaatcgtaagttgttgcaccatgttcacgtgcatacttcatcatcgtatactgcatatgatgatttggtaaaaaatctctaaattcattagaagacgcaccatataagtaatatgattttgagccagcaaacattaatagtgcaccagaaagataaataccttcaggatgttccttttctaaagcttctaggtctcgttttaaatcttcatttttagcaattttattttgcgcatcattaatcatattttgcgcttttttagcttgcttttcagatgtttccatcttctgctgccatttagtaatttcggcatgaagttcattcaattcttgatttactttcgctatattttcttttggatccaactttactaaaaatagttcagcatctccatcttcatgcaacgcatcataaatattttcaaagtaactaatatcacgcgttaagaagccatcgcgttccccagtgattttcattaattcagcaaatgtttttaaaccttctctatcagatcgttccactgtcgtacctcgctttaaagccaagcgcacttttgaacgatttcggcgttcaaaactatttaataactcatcatcatttttatcaattggtgtaatcatagtcatacgtggttggatgtagtcttttgataaaccttctttaaatcctttatgtttaaaaccaagcgctttcaaattttgcaaagcatctgtacctttatcaacttcaacatcaggatcgattttaattgcatacgctttctcagctttagcaatttcttttgcactgtctaacaatgcatttaacgcttctttattactataatcaacaacaaaaccacgtgaaatataacatagcgtatacggtaatttaggtacttttttaaaaagtaattgcgcaacaccctgaacttcaccgtcacgacctacagcgattcttcgcgcgtaccatccagttaatttctttgtttctgcccatttcgttaattgtaataaatctccatttgggtgagatttaacaaatgcgtcatgttcctgattagtgatatgcatcttttccatgatttatgatatctccttctatttaacaatacctttaattatacagtttgtatcttatagtgtcgattcagagcttgtgtaagatttgaactcttatttttgaaatgtccatgctccaattaatagtttagcaagttcaaatttacccattttaattgtgaatcattttatatctatgtttcgtgttaaatttaatgttatcgtacaattaatacttttcaactagttacctatacttcaaaatactttcatcatctaacacgatattcatttctaacatgaaccaatttgacttcaataaataaatttctcctcaagcaaccacattaatgttcatatacaattacccctgttataatgtcaataatctaataatgaggtgtttgatatgagaacaattattttaagtctatttataattatgaacatcgttgcaatcattatgacattgagtcaacctctcaccgtgaattactttagtttacgggttatacttatctttttcacatttatattatcaatctttttcattttaattaagtcatcacgattaaataatatattaacgattctttccattgtgcttgccattattcatatgggcattctcgctcatagtacttacgtatatttatactaatggttcaaagcgataaatagcacctctgataaaaattgaatatggtgaagttgcttgtgcgtcttttatgataaccgaatgatattttgaaactttaccatcttcaattctaaaataaatatcatcattttttaaaatcaaatctgtgtaatggtcattctcttctacaatgtccatatcaaaccatttcaaccaattcgatactgtttgtgatcggtttttacttttgacaataacagtttcaattgaaaattgtttttgaaaatatttttgcaattttttagtacgcatggaatcactttcttcccattgaataaaaaatggtggcttaatttcatcatcatcctgattcattatataaagcaattgccactttaccttaccacctttatgtgtatctctttccatttgaatcggccctactacttcaacctgctcactttgtagtttatttttaactgcctctatatcatttgtacgcaaacaaatatttttaaagccttgctcatacttctcttgaacaatttgagtagcaaaagcgactccaccttctatcgtttttgccatctttttcaacttttcattattttctacatccagtagctcaatataattttcattgatataacctaatttattgaatgttccatatttatgatgatacccacctgaatgtaattttataacatctcctggaaaactaaaccgatctaactgatctatataatgaatgatgtgatcaaatttcaatatcattagtatccccctatttacatgtaattacgcttattttaacaaagtataattatttttgctcttaataattatatattgatttctaattgctcccgttttataattactattgttgtaaaaaggttagctaagctaactattttgtcttaggagatgtcactatgctatcacaagaatttttcaatagttttataacaatatatcgcccctatttaaaattagcagagccgattttggaaaaacacaatatatattatggtcaatggttaatcttacgcgatatagctaaatatcaacccactactctcattgaaatttcacatagacgtgcaattgaaaagcctactgcaagaaaaactttaaaagctctaatagaaaatgaccttattacagtagaaaacagtttagaggataaacgacaaaagtttttaactttaacacctaaagggcatgaattatatgagattgtttgccttgatgcacaaaagctccaacaagcagtagttgccaaaacaaacatttcgcaagatcaaatgcaagaaaccataaatgtgatgaatcaaattcatgaaatattattaaaggaggcacacaatgactaatcaaggctcattaaataaatcacctattttcaccaaaagttttacaattaactttttagtcaactttatcgtatacctatgcatgtatttgttacttgtagttattgctggctatagtaagcaagctttcgacgcttccgattcattagccggattagttgtaggactatttattgtcgggtctttaattggtcgatttgctacaggtaaatttgtaaatcaaattggacctaaacgattattatttattggtttaattgctttaattatcacgcaattactttattttattgatggatctttagcttttttaatctttgtacgtctcataaacggtatcgcaactgcagttgtgacaactgcaacaggtactattgcggcatacgttacccctgttaatagaaaaagtgaaggcatcagtttattttctttaagtttagtattaggtacagcgattggcccatttctaggcatgttacttattacaaaatacgcaattgatttactgtttattatttgtgtcatattaggcatactcggactcattatctcattatttataaaagttgatttcgaagtaacaaataacaaaactgaaactaatgtcattgataaaccaagatttagtattcatcaatttattgcaaaagaggccattcctgttgctgtaattatgcttttaattggcgttacctatgcgtccatcctaacttatttacaagcatttgctttagagcgacacctagtaactgcagcaagctatttctttatttgctatgctatagcatcgttaattactagacctattgctggtagattgatggatgataaaaatgaaaatattattgtctacccagcatttatcatgcttttcctttcatttgtgtgcttaatttcaagctatcaaagctggttaatattacttgctggggcttgcctaggtttagggtatggaaatttatcatctgcaatgcaatctattgcgataaaagtctcacctccgattaaatatggtatcgcgacatctactttttacgttggtctagatgcaggtgtcggcttcggtccatcattccttgggttatttactcatatgttttcatatagtgaaatcttcggctttatggccgctttagcaatcattactatgcttgtttacttcttaattcatggacgtcatgtaactagaaatgccatgaactaaatatttatattcaaaaataaaaagcatgccaatctctattcatcatttgtctgtccccaagacgcaattatgatgtactgattggcatgctttttaagtttttagtttgtaacgcttaacacttctatttctttagtaattttatctaacaatttcttttgagaagtactatagaaatagaatacttgtctttcatccgtttcagaacgcaatttagaaataagctcttttttatagattttacggataatcacatcgattttacttgtatcccatagcatttcaaaatgtaatgtatccctcaattctttaccgctaatcttttcagcttcatacactttaaaaagtactacaaattcttcaattgaaatcttatgtgttgtttttaaccagtgctttaactgacttaactccctttctgcttctataaaacgttgaactttattactcataatatgatgcctcctatgtttcttcttagatgtttgtaattcatattattatacaattacttaaatttattatatatcaaacttagcattttatctattacaaatattaaattgctggctatatcttgtttagatttatatcttttggacaacttgttgtttattcgacaacatttatacctaaaaaagatatattacaactcaatgacttggagtgtgacaacaatgttaaagagcccttaaagatttattatgtagtgatttttgggagtgggacagaaataaccttttcacaaaatttatttcgttgatccccaacttgcattgtctgtagaatttcttttgaaattctctatgttggggccccgccaacttgcacattattgtatgctgacttttgtcagcttctgtgttggggccccgttccgcaacttgcattgtctgtagaatttctttttgaaattctctatgttggggccccgccaacttgcacattattgtatgctgacttttcgtcagcttctgtgttggggccccgccaatttgtaaaaactttaaaaacgatcatttctattaaatctggcatagatatgaccgtttttactttaataaataatattgtattttagggagtaagacagaaatattaaagaatctctaatgatttaatatgtagtggtccctacacattaaccaccaatataattcatgtttatctttttacgttgacgattggcaactgtttgagcagttctctcatctgaatatcgatcatctcttatttgccataaagctttaaattgttcttttaattcttcgtcggtcacgccagaacgaataaacgctttaacgttaaatccatcgacagttgcaaataaacatccgtaaaacttcccatctgatgacagccttgcgcgtgtacatgtagaacaaaatgattgtgaaacacttgtaatcaaaccaaattgaacaccattatccttatggcgataatattttgctacttccccaaaatattttggttctacaggatcgatttcaaagtgctgctctatcattgtaagcatttcatctttagttacaactttactgaaatcccatccattatcattaccaacatccataaattctataaatcgaatctctatatgtttatctttaaaatattcaagcattggtatgatttgatcatcgttaatacctttttgtataacaacatttacttttacattcaaaccaatagacgtcgcgtaatcaatttgttctaaaatcgtagtcgctttaatattacgattattgattgattgaaatagcgtatcatcaatagcatccaaactgacattaattctgcgtagcccagcatcatataacttttgtccatgcttttttaataacaaaccatttgtagtcaaaccaatatcttcaataccatcgatttgatttaatttagctataagtacatctaaatcgcgtcgcatcaatggttctccacctgtaatgcgtattttttttacacctaattctgcatataccttagcgattctagccatttcatcaaacgttaacagttcatttttaggtaaaaatacgaaatcatctccaaatacctctttaggcatgcaataatcacacctaaagttacaccgatctgtcacagataaccgtaagtcacggatgggacgtcctagtttatcttttatttgttctaccatttgtggacctcctaacagcttacaatttttgaattaaagcgtccaaatcatgctgataatttatatttttgtaccaatatgagggcgcatctacatccctgacatccaaataatccgttgataattcatgatatacatttttaaaactgtaattatcagaatgtagtgctttagttatagcgcctaatgcattcggactataaaatgcaattgttggaataaaacgtccatcttctttaaaagctgcgacatctaaatgattttcaataagatgagaaactaaaaactgatacaacgtgcttacagctttaccagtaatcattggtgtatcaacagaaacgacaaaaaacaattcttcttcaggatgttgcttcatgattgtataaattcctgctaatggacctttatcattatgattctcatcatctataacaacatttggatatttaaattgcgttgccaattgcgcatttgtactaataataatttcattgaacatatttgttgattctaatgtcttaattactctactataaaaggtctcaccgttcacttccgcaaaagctttgggcttaccaaatcgcactgaatgaccacctgcaagaattattgctttcatgctcccttaacctccactaaccggtggaattaatgcaacagtatcattaggttgaatgaaatctgatttttgtacaaattcctcatttacagcaacttgaaactttttattattgatttgcggataacgttcaaacaataaatcttcaaattgttgtacagtcaatgcttgttcaagcacaatatcttcctgtgctttttgtaatatatctttaatttctgcgaagtaaagtaccttcatctctcttattcctccctcttcgcttcttcataattccctttttgatgcccttgccattttgaaccatcttcccaaatttcttttttccaaatcggaacaatttcttttatacgctcaattgcatattcatttgctcgataggcatctttacgatgcggtgaagaaactgcaattaatacagcgatatctgaaatttgtaatggccctattctatgaacaatactcgttatcgttccaggccatttttcatttatttcatctccaatttgtgccaatttcttttcagccattggaatatacgcttcatattctaaatattccgttttgacgcctttagtccattcgcgaacatgaccggtaaaaacaactactgcaccttgatattcatttatagtgaattcacgatattgttctgtttgtatcggttctgtcacgatttcaaattgtttcattcatttcaatcctctatgttaattgtgtatcacaatcatttttaattttatttaataaccattgctcaaatgctgtaaaatcttcatgctcccttacattaatgctataacaaacattcgacaattgttgtaatacttgcaactcttcttcatttcgatagactacgactttttcaaaatcagcatttttaaagccttcaactaatacgatattggtgtcaattgtaacagatttttcaataatttgagtaagattttgattatctacacgtgttacagtttgctgatattgaaaaccttgtacaatactttgatctgcccccgcttcaaaatgcttcatgtgatcgacgtctgaatcctgtaattgaacatcttccttaccatgcccatgatgtttaatagtagcaactgtataaccatgtgactttaagaaagagacaatatgcctcatcaatgttgtcttaccagactttttgtaacctacaatttgtaaaatcataaaagaagttcctcttcagcagcgtcagattcagtcaatataatatctactgtatgccccgctttaaaaccacgtgaccctcctggtaacatgaccatacagttagcatgtgcaatcgctacaaccgcacctgatttattgaatcctgaaggtactacagtagctccagcacttgttaacgttgctttagcacgtataaatcgtgtgaatgggtttgccttggtaaaatcttccattaatgttgctttaattatttgcgggaagacttctagtgcgccacacatatgtttaacagctggtttcacaaatagttcaaatcctgtaaaacaagctgatggatttccagataatccaaacaaatactttccatctgcaaatgcaaccgttgttacgctaccaggacgcattgctactttattaaataacacttccgcctttacagccttataaatctcaggtaaatagtcaaaatctccaacagaaactcctcccgttgtaataacgatatcatgtttttccatagcttctttaacgacttgtatgccactatctaaatcatcttgttgtgttttgtaaataccaacttcaagacctaatttttctgctaaggcacgaatcattgggccattagagttacgaatttttccatcttctaatacatcattaacatctaataattcgcttcctgttgcaataacagcgacactcggttgcttaataactttaacctctgcatagccatatgttgcaaggaccgctatagcccctggattaattacttgtcctttttttagaacaacatcgcctgtcgttgtttcttcaccttttaaagatatattttcattttttgaaaatggtttacgaattgtaaatgtatcttctagttcaatcgtttgttcaaacataacaacagcatctgcgccattaggtatttgtgctccagtcataatacgcaccgcttcgtgatccccaactaatttatcagaaactgaacctgcaccaatttgatcaatcactttaaactcaatgcgattctgaccacttgccccttgtgaatcaacactgcgaattgcaaaaccatcataaggtgatttatcaaaccttggtatatcataagtagctacaatatcttctgctaagatatgatttagacttttttcaagtgctaccgtaattgccggcattgaactctgctgattaacgatacgttgaattgcttctttaactgggattgggtttcttttttctactaccattaaaaatcatctccaaaacttttattttttcatgatatactagatgcactaggaggggtaaaatgactgagtttactcatattaatcaacaaggccacgccaaaatggtcgatgtatcagacaaacaaattacaaaaagaactgctgtcgctcattcaagcattactgtaaatgaaactatttttaagcagatttctaataacaccaataccaaaggcaatgtattgaacactgctcaaatcgctggtattatggctgccaaaaatacatcaacaattattccgatgtgccatccattaccattgactggcatagatgttcacttcagctgggatgaaacaaatgcacccctttatactttaaacattcaaacaactgtctctacaactggcaaaaccggtgttgaaatggaagctttaaccgctgcatcagcaacggctttaaccatttacgacatgacgaaagcagttgataaaggtatgattattggcgaaacctaccttgaaagcaagtctggcggtaaatctggagattttcaacgccaatcaaatcaataaattattttgtaagctcatgaatcagatgattcaattctggtttaatgagcttttctaatgctaatttaactgcgcctgttgatcctggaatcgaaaatatcaatttattattaactgtacctgctacagcacgagacaataatgcacgcgtgccaacatcttcaacataactcaaatatctaaacaattccccaaagccttctatctctttagttaaaagtggttttactgcttcaatcgtcacatcacgttgtgcaatacctgttccaccagtcgtaatgatgacatcaatatcttcttctaaccacttcttcacctgcgtcgtgatggctactttttcatctttcacaattgtataatgtgcgtcactcacttcaacgtcatctgcttgtaatagttggcgcacgcattgaccacctttatctgtatcaaagtctctagtatctgataccgttagtacggctgctttaactgtacgattcaatttaacgttttgatgttcgcccataatattacactccttttgtcttatctttttttatccaaacaataaattcattagatgtgtggcatctgatgtgcgtgtcatgccatgtattaaaaaccttccacctttaaaagcaacaatgcggtgtcctttaaattcaaacataaccatatacgaattactgcgataatttagttgatgttgttttaaaaattgaacaagaatgtcgtgtgtaattgatgcattttcatactgtacagtgtctctaccacacaatgttgcataacgttgttcattcttgtttaaatacggataacttggtacatctccacaagttgtacagtctgaacgttgcattttactgaaaccaaatgaataatgactaccttcccaaatatcgccataagttatttttgtgtcaattggttgttccgttaatactttcatcgcatctcttaattgtaaacttgttgccatcgtcacggcaggttgaatgacccctactgtatcacatgttaaatttaatgctggcaattgtggtaccaaacagttaaagcaaggtgttttaccaggtataaatgcagcttctgtatatgtactctgtacaacaccaccataaatccaaggtatacgatgtttatatgcaaaatcattaatcagttgtcgtgtttcaaagttatcggttgcatcaataataacgtcaacgtcctgtccatgtgtttccaaaaaataataatccacatgggcaatataatcatcaatatcaacatcactacgtaacgctagcaaatgctttttagctgcaaccaccttaggcatcattttcaaagcatcttcttcagtaaacaatgtttgtctttgtaaattactaaattcaatataatctctatcaacaatgattagtttagcaatgcctgctctaacaagtccttcagccacatgtgtacctaatgcgcccataccaataatcaacgcacatttttgatttattttgctttgacctatttcacctatttgtttaaataaaatttgccttgaataacgttcttgactcacattaagttatcctttctttttatcattactttcattatatgacgcgcgtcaatgtctctcaaaaaaactgcccctaaaaaagagtttaaaacatcattaaaatgctgatagaagcattcacttctacaattttaaatacgttctaaactctttaatggcaaataaatgattacccaattgtaataatttcatgagccatttgttctgcttcatagtttgaatgtgtcacaaatatgattggtatttgccattcgttgaaaatacgtttaactaatgtaatactctcatcttttgtagtatcatccaaactagaaaaaggttcatctaataaaattaaatctggtttcgtgctaagtgcacgtgcaagtgctacacgttgcgcctctccacctgacaatgtcataggatattgtttcatcaaatgatcaatgtttaaagtttgaattaattgatcgatgtgttcagatggttcagccataaaagtaatatttttatagaccgtcatattaggaaacaattggtagtcttgaaacagatatccaatacgtcgttgttgaattttaacattcacgttttttgccgtatcagtaagtaattgcccattcacttcgataatagcttcatctgctttacgtaatccggcaatcatatttaaaacagtagttttaccaatgccagatggaccacgaactgcataaatttttggttcagtatcatctatattgatgcgaattaaagtgttctttaattgatatttcacattgattttaagcatctagtcgacctccttatatttatctttattcaataaattaattgtagatataaccacaatagagaatgcgactagcactaatacccataaccacgcttcattttctctaccttgttccactaagaagtatatttctaaaggtagtgtattcgttttatttggaatatatcctgcaaccattaatgtagcaccaaactcacctaatgcacgagcaaaactcatcattatacctgctaaaatagagcgtttagctaatggtaaaattaatttgaggaaaattttcgtttcacttgctcccattgttctagctgtattaatcattttcgtgtctatacctctgaagccttgcacagtatgttgatacattagtggaaaactaacaatgacagatgctatcacagcacctgtcaaagtgaacactacaggtaaatgtagtacattcgcaaagaattgaccgattggtcctcttggcgagaagatgattaatagaataaaacctaataccgttggcggcaaaacaataggtaatatcaataaactttccaatactttaacccacgaacccttacgacgatacaaccatttagatataaaaatacctaaaaccgttacaataatcgtactgattacagcaactcgtattgatatccaaaaaggtgttaagtcaggcatggattacaactccttatgctgcaaagtggtattcttttaatatttctttagctttatctgattttaagaattccatccactcttttgctaatttactatctgatgtagcaccagcttcgtatgtgattggcttcttaagttctacttctttaattacttttacagtatcaatttttttgttttgtttatataagtcagttttatacacaaaaccttgtttcgcattacccttttcaacataatttaatacttgttttacatctttagcataaacgattttactttcgacttctttaaataagttattgttatctaaatactgtttcgcatattttcctgctggtacagttttcacttcacctaatgctaatttatcattgtcttttaagtcttttactgaagtgtaatttgaatctttatcaccaattaatactagactatttttcgcatatttatatgtatcatgcgctttattcttgtcttttaatgcatctacatctttagtatttgcagacataaatacgtcaacaggtgcgcctgattcaatttgttttcttaatgcccctgatccaccatagttaaatttaatatcagcatttttatgctcttttttaaattctgaagctaatttcttggttacatctgttaaacttgctgccgctgcaacttgaatctcttgtttcttaccattgtctgcgtcatcttttttactttcattattatcgttagaattagagcaaccagctaatactaaaaataatgccattacaatagctataaaacgtttcattttcattgagtgaacccccatttttaataatatttacattttcattatacacttactattatatttgaaaagaaccgttgcctgtttatatattgattcaaacaattgtcaaatttgcataagattgatatttattaattgatcccctagtatgtatactctcgaattcaatttaaatcaaacagattgctcgctattaatttttataaatcaaatttcaaacttaagcaaatatgttaaaattttaagcaaattgctttaaaataaagtttaagctaattaaaggggttagataatgaacaaagatgtatctttaggtcaaccaattgttagatatgaagatggaaaattattcaatacaacagatcaatatgtgacagaatttccacttacaattatggtgaatggtgaagaatttgcgactgttatatgcagtccaacaaaccttgaggagttagtcattggatttctggcttcggaaggtgccattttaaagcgagatgaattaaaatctgtgctgattgatgatagtaaaggttttgcccatgttgaacttaataaagatttaggcgatcgctttcaatattccacaaaacgaatgattgcatcttgttgtggaaagagtcgtgagttttattttcaaaatgatgctgctatcgctaaaacatctatgtctaaaatcactttaactccaatgcaaattattaacatgatgactcgattacaaagtgcaagtcatatttaccaagaaacaggtggcttacataatgctgctataagcgatggtttgacattttttgtacatcgacaagacattggtagacataacgctctagataaattatatggattttgtattcagcgacatattactgtccgagataaagtattaatttttagtggacgtatttcatcagaaattttaattaaagccgcaaaaattggtgttggcgtcattttatctaaatcagctccgacaacgcttgctgtaaccttagctaatgacctaaatattacggcagtaggatttattcgaaatggtggctttaatatatatagtcatccagaacgtatcatcgactctgaacaataacatattcattatagtgtgtcataatgaacgatattctacatgaatcaacaatataaaagcactatttttataagtataagtagctcaaaacaatttaaaaagcagtaagttgatttctactcgaaaccagcttactgcttttttattctaatacaaacctatcatcaatcgttaatttccaatatcttcttttaatatttgataacaaaatgattggtaaacataaccttgctttgcatacatatcttttgctgtatcttcaccatctgcaactaatatgattggtttgtgattttttgatatggcgtattcacctatcaacgattgaattgtagatccaattccttggtgccgaaattgttctaatacaccaaatccatctaattcaatgtaattttcactttcaatgacatctacaacgccaataggttcattatttaaataagctactaagcgtttaatcacatctttttgataatgttcccttaccatttcttcatgtgcatctgcatagtcttttccaaatggcaaactaaactgatatgcaacttttaaataggcatctatatgcgactcgtcaacgatggcaatttcaacgtcagagttacgcggcaaattggcaagcgcatcactttctatggcatacaattccataatacctagttcaaaattcatatctttaaacatagccatccaatgattatcaagttgttcattttccgggaaactaaacgcataatgatttgaaccttgatttgtatgtaattgatgttgacgttctaagtctttcagccatcgctcttgggtaggcgtctttttatatatccatgtgttgcttgtgtatcgttgtggaaaagaaggcgttaaataaattaactgctcgtcgtcattttcaaatatagtgccgttacaatatatatctgacatacttatactagccattgacacctactcctttcacttttataaatttcaaagcaacttattcaattactttattatcttaacttaaatatgattattttaatcccataatttgacgaaactgcgagtgattaagtaaagctgtaccaatcaaacttgctacaattgcttttaatatatcaccaggcaaataagctaatgaaattgaaatagctttcgtaaatggtatgttaataatcatgcccataatcaatgtaccaataacatctaatgctataacaccaaaaactaaaataccaacgaataaaatccagaaattaatttcattgatgaatctatcacgaatcgcaccaatcatgaatgctacaactggatataatagtaaaaaccctgctgaaggacctgcgaatacaccaatgccaccgcgaccgcctgataacagtggcaagccagcaactactaataataaaaagacgataacacttaatgtgccatatttacgtcctaaaatcacacctgctaagaaaataccaatgttttgaagtacaattggtactgaagaaaatggtagtggaattaccggtaccaatcctaaaatagcgataatcgctgtcattaaagctgtatatactaactgttttgttgtcattttttacttcctttcgtatttcatgaccattattatagcaccattgtaaactttaagaaacgaaaagtttacaataagttgttctatataaattaaaaccttaattattctacacagctgttaatttacttttttagcaagtgcagttatataatcaaaaaatgcgttgttatctacatgatttatgacattaattttgcgcccatctttacactcaaatgtcttaccttgacttggtccataacttattacatcgacttttttctcaattgaatgaaccaagtccttgttaccaatataagcagtcgttaaaacatcccataaaaagtaagtagaatttgttataaagtgtgttaatggtggtaccgctgcataacttactcctaaaaaatcaatgcccgtatattggcgttcattcgcccatctttgtctaacatctaacgttaacggtacttgattcgtactttctaaagcaaccatatcaatctctatatcgctatcaaaaacaattttaaccgcttctggatcccaatatgcattccattctgcagaaccatcatgctcaggttcttcaacatttccttttggtaaaaaggtaccacccatccaaactaatttttctatatactgaacgatagatgaatctttttgtagtgcttttgctaaatctgtaagcgggcctgtaaataataatgttactttttctgattgtctctttaaagtttgaataatgtcttctaaggcttctttgtcgctcacatttgaagcaacatgtttgactggctcatttaaaattggcaatgcgtccataaaaaaggcatgcatacgccattctttaggaaatggattttttcctcgttcatatgatggcgcaacttgaatatcttcatttgaaaaacgattaataatttttactgatgcgctcaaagatggctctaaataacaatcagcaccaattgtactgacccctatcaattgaacgttttccatttgtaataataaaaatagagacactaaatcatctacaccaccatcatggttaaaataaactttcttagtcactcgaaatcccccttacatttcattttccattaacaatattatgtttttataaaacgttgttatatatctttctacaaaatcataacattctgttgtaatccttttaaacctcttcttttattgatagccattccctgatatcccttccataaagtatgcactaaaataattatgatataacttattaataaagagatacattgggctattttctcaggtatactactatagctataataatactaatctatcattaattaaattgaacgataacaacggcacttattatttaaaaaaatacaaatatctaactttctagctataaaaataagagcctaatacaatatcaaaagattgatatgtttcagactctcatttcactaacttatatagctgaattattttgcagctttaattaatttttcttttaaatctttacgcatgaaatctaatgtataaggatcgttgtaccagtatgtaccagcatcaactttaacaatatgtccttctttagtagctttcaaattcttccacatgtttgttgattcatatcctggtgtaggtttaccttcacttgtactcacaatgtaatcaccagcatatttttcaatttcttcttgtttcacttcagcccaacctgcttttgcagttaacttttgttgttctggttgcatttttaaaccaaatgcttgatataatacttctccaccacgaccccagttatcgccgtaagtgtataattttttatcaaattcatcaaacaatgacactgttgcatcttgtccaattgcttttttaatttctttaccgtctttagcagttgtttcttcccaatctttcttccaagcttttactttatcttctttaccaacaattttccctaacatttcttgttgttctaaatatttatgcttattatagtcaacaactactgttggtgctactttttgatattttttaatatctttgtcagtagagtatacaataattaaatctggcttttctttagcaactttttctacatcgccatcaccaatttttgtaacacctttaaatttatcttttaatactttgctttgatcgacttgttgatttacagctacaatgtttgcacctaattttttaagtccaccagcatatgttggcgcaactactgcaatgcgtttagggtctttcggaatatctaccgttttgccatcgtccattttataagatttagtttcagctttgttatttttttcaccttggttcccacacgcagctaacactaataacataattattaatggtaataatagttttttcataatttcctcctattgaaaatgattatcaattattccaaaattatacaagattgcatatacatttacaatagctagtgctatttatttttttattttcgcaaaaaatttagcaaaatatcttaacatccctataaatccccacaaaaaagggtaaatccgaacgtcaaatttcatctctttatgccaatcaacgatcgatttacctttttaaatttaaaatgtatctgtaatactcttagcaatatttgtatatgctgcatcttccataggtggattgtgtaatcctgcacgcatgtcacgatagtaacgttgtaatggtcgattcatttctaagcttttagcaccaactattctcatcgctaaatcaatcacttcaagcccttgattcattaccatcactttactcgcacttgttggatttcttatctgactgtcatctttatattgttgatacccttttgctgtactccataaaaattgtctcgcacataacaatagcgtttccattttccctaaattttgttgcacagttggcaatgttgcaatcgttccttcaatactattagggctatgttggattgcaaagtctacagcataatttctagcagcttgtgctatacctaaataacagcttggtatatgcaatatccaaccatttggcgctttacttttctctgtttccactaaatgttttaatggtacttttacatcatttaatattaaatcatgactttctgtcgctcgcatacctaatacgtcccaattatcggcaatttcaacaccaggaaaattcctgtctactaagaaaaaaccaacactttctaattcttctatataagcagcaacaataatatgtgttagtgctttactcattgatgtatatgtcttcacaccatttaaaatatacccatcatcagctttaacagcatgtgtacttggtcttccccctcttgttggactacccatttcagcttcactaactgctctattaactaatgcaccattattaatttcaacagcaaattgctccaacatatcttgagaccataatttctgttcataaatttgtcctacgacactcacatgccaaccaatagataatgctgtggcaccatcaagttcgcctaaaaatgattgcaaaataaccatgtcttctatggtcgcaccttcaccaccatatgcttttggtaacgttaattttccataaccttctttaattaaccattcaatatttttatatggaaattggctatgttgatcattatattcagctttagccttaaatatatctccaattgctttgaatttttcaatccattttctttgaatttccgttgttattaaaaaggaattatccatatcattcatattagtcaccccacacaacacacaatataaattatttattcctagtttaacactcgactttaaaaataaaaaggaacgtgctgtgaacaattaaaagaaaactgataattcgattaagtatgcacttaattttatccataaaaatacaccttaaactatacaattcgctgtatagtttaaggtgatattcaaacaatattaggtttgatttaactatcaagcatctactttgtcatgtttaataccagcaaataataaaatccatgtcacaataataaatggcaatgttaatgcaggtaagccaaacggttcaagcaatgttgttgtacctagttgcaccactactgttaataacacacctaaaaaagtcgaaatataagggttaatcgctgttttaaatgtatatcctagtgcgattgccattaatacaaagttataaccgaataatccctgattaatatcatcataattaccacctaatagagctacaatgataaagcttaacaaactagctataacagctaagagtgctgcttgtcttgatgctatcaatatgccgattaaaatacatacgccaccaattacactcgcttcgataaatacttgactaaatccttcaaataatgactgaatgaaatgtattctatcattgttgctaaaattaaccgtttcaatgttttgaggcattaactttaacgatgtatctacaaatttaacctgtcctgaaagtaaaattgtaaaccaagtcacaatgacaaaaggcatcgtcagcatcggaactttatatggtcttaaaacttctctcactgcagcagcaactggtaacgttaataaagttgctatcattgttataacaatatctaatcctgacttatctaaaaagattgttaacgcaatggcagttaacactggattaaatccagctaacccatcattaatctctgcctcactataatttataaaacgcgcaaaagtataggcgatgatgctacctacaatagccgctaatccaattgtccaatcggcaacaaataatcctattaagataaataatcctgtccatttattactaattaacacaacctgagaaatatttttcaaaagtacatctattatcttcaaatctttcacctttcctttgaatcattactcattaatatactactattctatgaaaagttatattaaaaactattttggtttttacataaatatattccactatttgtttatgattagattgtttgcttcaatagcggatatgctaaaaatataattttctaattacacattgaactttgtatattacttgtttatcacaacaattaggattaatataaattttgtaaattgtatctaatatgaaattgggggttttaatttgcattttacacaacgagagcaagacaaattaatgattgtagtggcggcggaagttgcgcgtcgtcgtaaagcacgtggtttgaaactaaatcatcctgaggcattagctttaatcagcgatgaattattagaaggtgcacgcgatggtaagaccgttgcagagttaatgagttatggtagacaaattctaaacaaagaagatgtcatggatggtgtcgaacacatgattacagatatcgaaatcgaggctacgttccccgatggtactaagttaatcacagtacatcaccctattgtttaaaggaggcagtcaaatgataccaggagaaattattacaaaaagtacagaggttgaaattaataaccatcatcctgaaacagttatcgaagttgaaaatacaggagatcgaccaattcaagtgggctcacattttcatttttatgaagcaaatgcagcattagatttcgaacgtgaaatggcatatggaaaacatttagatattccagctggagcagctgttcgatttgaacctggggataaaaaagaagttcaattagttgaatatgctggcaaacgtaaaatttttggttttcgtggtatggtcaatggtcctatcgatgagtcacgtgtctatcgcccaactgatgaaaatgatgaatatgcaggtgtattcggagataacggtgctgaaaacgtgaataaaaaaggaggaaaaagatcatgagctttaaaatgacgcaaaatcaatatacgagcttatacggtccaactgttggagattccattcgtttaggtgatacgaatctatttgctcaaatagaaaaagactatgcggtttatggtgaagaagctacttttggtggtggtaaatctattagagacggtatggcgcaaaatcctcgtgtaacacgtgatgacgtgaacgttgcagaccttgtcatttctaatgccgttattatcgattacgataaagtggttaaagctgatataggcattaaaaatggttatattttcgccataggtaatgccggcaacccagatataatggataatgtcgacattattataggttcaacaacagatatcattgccgctgaaggtaaaatcgtcactgctggtggtattgatactcatgttcattttattaatcctgaacaagcagaggtcgcattagaaagtggtattacgactcatattggtggtggtactggtgcttcagaaggttctaaagcaacaactgtaactccaggtccatggcatattcatagaatgttagaagctgccgaaggtttaccgattaatgtcggttttacaggtaaaggacaagcaacaaatccaactgcactcattgaacaaatcaatgccggagcaattggattaaaagtacatgaagactggggggcaacaccatctgctttgagtcatgcattagatgttgctgatgaatttgatgttcaaattgcattacatgcagatactttaaatgaagcaggatttatggaagacacaatggctgctgttaaagaccgtgtacttcatatgtaccatactgaaggtgctggtggcggtcatgcgcctgatttaattaaatccgctgcattttcaaatattttaccttcatctacaaatccaactttgccttatacacataatactgtagatgaacatttagatatggtaatgattactcaccatttaaatgcggctattcctgaagatatcgcattcgcagattcacgtattcgtaaagaaacgattgcagcagaagatgttctgcaagatatgggtgtattcagtatgattagttccgattcacaagcaatgggccgtgtaggtgaagtaattacacgaacatggcaagtagcacatcgcatgaaagaacaacgtggtcctttagatggtgattttgaacataatgataataatcgcatcaaacgttatatcgctaaatatacaattaacccagcaattacacacggtatttctgaatatgtaggatctatcgagccgggcaaactagctgacattgtcttatgggacccaattttctttggggttaaacctgaattagttgtaaagggcggattaattaactctgccgtaaatggcgatgcaaatggttctatacctacatccgaaccgatgaagtaccgtaaaatgtatggtcaatacggcggaaaccttacaagtacgtcaatgacattcgtgtctaaaactgcttatgaaaatggtatcaatcgtgcattaaatttaaaacgcatggtgcgtccagttaaaaatattagacaattatctaaagcagatatgaaaaataacagcgcaacacctaaattagacgttgatccacaaacatatgaagtatatgtagatggagaaaaaattacaagtaatgcagcaactgagttaccattaactcaaagatacttcttattctaggaggaacatagaatgattgttgaagaaatccaaggcaatattgccaatttgtcaaattcagaaaaacaaaagcacgtcgaaaaagtataccttgaaaattcagatcttgttaaacgtattcaaagagtcgttacagaccatggcactgaaataggcattcgtttaaaacaacctattgacttacaatatggagatattttatacgcagatgaccataatatgattattgtggatgttaattcagaagatcttttagtgattcaaccaagaacattgcaagaaatgggagatatagcccatcaattaggaaatcgtcatttgccagcacaatttacagagactgaaatgctagtacaatatgattatttagttgaagatttattaaaaagtttaggcatcccatatgttcgagaagaccgtaaagttaataaggctttcagacatatagggcattctcatgattgatcatacacacttaaggttatttcagttctgtgattcacagtttccaacaggtgctttcagtcattcatttggtcttgaaacatatattcaacgaaatataattcatgatgatcatacttttattgcttggttaaaaatgtttttacaagagcaacttacctattctgatggtttagccatgcgtttagtttataatgcattggaaaatgatgatacacaaaaagtattacacatagataagctgatgtttgttcaaaacttacctaaagaaacacgtgttggtgcaaaacaaatggggactcgcatggttaaattggctttagaactttataatagcccatggattgcttggtatcatcaacaaatgcaagataagaaagcaaagttaaatccagctatttgttttactatgctaggccatcatttaggtgtagatattgaaacgattattgattactatttatatcaaaatgtttcaagtttaactcaaaatgctgttcgtgctattccacttggacaaactgctggtcaaaagatagttactcacatgattccttatatagaagaaacaagaaagcagattttcgaattaaaagaagcagattttggcatgacagcgcctggtttagaactaaatcaaatggcgcatgagaacgtcaatgttagaattttcatatcataggaggttataattgtggcaaatccgattaaaattggtattggtggtcctgtaggtgcaggtaaaacacaattaattgaaaaagttgtaaagcgtctttcaaaagaaatgagtatcggcgttattacaaatgatatatatacaaaagaagacgaaaagatattagtaaattcaggagttctacctgaaagtcgtatcattggtgttgaaactggtggatgtcctcatactgcgattcgtgaagatgcatctatgaactttgcagcaatagacgaattattagaacgtcatgacgatatagaactaattttcatagaatctggtggcgataacttagcagcaacatttagcccagaacttgttgacttttcaatatatattatcgatgttgctcaaggtgaaaagattccacgtaaaggtggtcaaggtatgattaagtcagatttctttgtaattaacaaaactgatttagctccctatgtaggtgcatcattagaacaaatggctgaagatactaaagtatttcgtggtaaacgtccatttacttttactaacttaaaaactgacgaaggtttggatgaagttatcgattggattgaacgcgacactttactcaaaggattatcataatggatgaacaacaatggactgggcaacttgatttaacagtgtttttcgatggcaatcgatcagtatcaagagatattttctttgaaaaagcacttaaagtgatacgtccagtttatctaaatcaatctaccattcctacattttatatagtaaatgtaggtggtggctatttagatggagatcgttaccgtatgaatgtgaatgtcgaagataacgctaaagtgacattgacatctcaaggtgcaacaaaaatatacaagacaccttccaatcatgttgagcagtatcaaacttttaatttgaaagataacgcatatttagaatatgtcgctgatccaatcatcgcatatgaaaatgctaaattttatcaacacaatacgttcaatctcaataattctagttcattattttatactgatattttaactcctggttattcaaaaactggcgaagccttcaagtatcaatatatgcatttaataaatgaaatttatattgaagatgagttagtcacatatgataatttattattgaatcctaataaacaatcgatcaatgaaataggttatatggaacattactctcattatggctctgcttacttcatacacgaagatgttaaccaaaaactaatcgattcagtttatgaaaccattagttcttatagcaatacattcgattgtcgtgttgctatttctcaattgcctacacatggttttgcagttagaatttttgcttatcgcacacaaattatagagaaaatacttggaaccatccaaagctatatcgcagaaaatatttatgatcgtaaacttgattttctaagaaaatattaaaataaaaagactagtgtaccttgtttcaagcttaataagctgaaataaggtatggctagtctttaactttaattaaagcatcttcaatatttaaattttaagttaattttatgtcccaatgctgaataaataacttcgttttaataaattgttatcgttcaatgttattaaacgcaattaaccttgatttaatttttaatgtattcttctaattctgaaatcagtttttgaatatttgctttttgtgtatctgtaacataaacaataactgttctttcgtcttgtaaacttcttttctttgataacaattttaaatcttttagcttttgtaaagctttagttaaatagtaaggtttgaactctgagcacttagcaatctctttagatgagatttcgttagactcacttcttaaaatatgatttaaaatataaatttcttcatagttcaaattgaacttcttttttgtatctctgaaaaacttcttaacttgaaatgttgcgttgactaaatcattaatgtcattaattttactcattattaaaccactcctctgatgcacatcttgttgtagcaaggttcacatgtaatttattaaatcgaaactctatccaactatgttataaagttcattctaaacaaataagtataaaaattcaatatttttattactagaatatggttaaatacatttatttcttataataatttgatgtttaagatattttgccaaattgaaaattattagtctgaatattttgtatcttaactgatatgtaaacttttaaaattttaatctatatcaacgtgtttgatttgatattttttatattaattggatggcttgctcacaaaatttataaaatataaaaaaagaagagctttaaatcataacgcatgccatttatctttaaatgcaatgagttatcattcaaactcttcttatcaacctacatacattgacattatactatcatatgttgttttacatattcaacaaacatttcaacgttagcacttttaatatcatgcattgggacattaccaatattaaatttgaacattatagtttgaccatcataatctatcttctctatttcattataactaatacttctataataaaattggccattcatatctacattcataattaatctttcatttgttgctataaatgccccttcaaattcattctcaccttgaacttgatactcaattattcctagcactgacggaccctttttttcagttggaaataaatcatttggattcacattatctaaaatcataatatccctcccacttaaaactataaactattcttcataggtatatgaaatacaagtgattaactatttattattaagcttaacttgtattcccttttcaagataattataacatgcttgaataagcatagtgactttagaaaacttttctcgcttgattgttacaataacacgcctttcatctaattcacatctctcttttttaactaatcccttcaaaattaaacactttaaaatcgggctaaccgcaaatatcgggtgatggaattcaccctgtaattctttaaccgtcaattgacccttatgcagatttaatattcctaaaacgtataactcttctaatgttaattgacacatatttaaataacactttagatttcgaaataattcttgtgacgacaataaatacgatacatagtcacaactaaaatcaaatgtatattgaccaaaataacgttcaatatagtcactaagctcattattcatatattctattttatctatatgcattttattaatcgaaatagtcaatttacgttgatccctttgatctcttcctttcaatagccattgatgattgtttaaataacttaacatttgaagaagtgccatcttagattggatttctttcatttttaataacctatctattgaagcgctattggaatcagaattatcatatttaactaatagatttaatagtttcacttgagtcaaagtgagatgaaatgaatatttcaacatatcattaatgactttcaacattagtatgtgtgcagttaaacgcttaactttaaatttagacatctttaaaaacctctcttaaaccatgcctatatctcaagatgatatttcaaatgaacaatactattgcttgagaccattaatgaatgatcataaatatttctttctataaaattagctttccaataactgtgttgttgcataatatcattcacaagtacaccattttcggaagtatgattatctttatctatacttaaaacaatttgtttagttttagcatggctaaattgttgaagacccttacacgataaacgtatagcgtctgaattctcatttaacaatgcggctggcaaacaaatgacacattgtacttcatgtttgaacttcgttacaatcatcgtgtcattttgataaataacaatccctcgtaattgattaagtatatttatgataaaaatgaatattgataatctagttaaatttatttctttgctcgcttcacttataattgacatgtgcataataagtcctcgaaattttgtataatttgtcaaaagttcagtaaccttattaaaatcagacattgtgattttttcttttaagtcattattctcattaatcaaatctacatcacatataattttagaacatgcaatagacacctgttctatttgtcttagcggtaagataaaatagtctattagatgatcaatttctttatcatagcgcgtattcaactcttttggttccagatgatatattaattcaaatactcctatataattatctattaaacgtttcagtttttgaattgcagtagtatttaagtcgttaattaaaaatgcaatcttacatctattactctcaaaagtcatattaaaaattgtagctactagcttttctatcttgcctctttcagtactcgttaacaattccttatattcatgtttaatacgaaatactacatttacattgtaattcactatcttttgaagtaataaagtgatttgttcaatcgatagctcattgcttgtgtcgattgtaacaattatatgcaagttttcaggattaacacctaatctttgaatgatttgtttaatagtataataatccatccaataaaaattacttcctttaatataaatgtttttaggttgatacatttgactcctttttgtaggctcaaaaggtatatcaatctcgcgcatacttgaagaactttgattagtatcatcaaataattcaattatatttttatcaatttcaactaattgggaatggttaattgaatgagatgttggactatatctttttctaattaatttaggagtgttaccatacgtttctttaaagaggtgtataaaacgagaataatgattaaaaccatgactacttgcgatttcttcaataggcttcttagaagttaaaatatcaattaagcaatgctccagtctaatatgatttaaatattgaataaaattactataaggtgtcgctttaaacatgtcacttaaagctttgtttgtaatactaacttgattaatgacatctttcctatttatctttttatggtggttgtttgttaaataatcgtgcacttcttcggctactaaatgacgactaccatcgtatgtatttaatgacattaattcaacacacatgtaattaataatcttatcattagcattataagactgttgtttaattttgctgtagattaaatacttaatcaagattctaaaagtgctagcaacctcatttgttaatatcttgccacgcatcatatagtttgcattcataaacttcaaaaatgtctttgcacttacttcaacaacacaacatacactatcatcatgaccatcaatttgatacaaatcattcaacataataacggtgacatcatttctttttacatcatattgttgtagattgattgaaactacacctgtaccttgtagccaatatataatttttaagttcgcttccttcacactactcattttcatacttttataaatatgtagtgaataattatctgtcatcttacatcctcacatatacaaatatattgatttactcctgtttgtctttctcaaatcaattgtcaacatctaatattcactaccaattatatcgccacatgttttttagcagtaacaaaacataaatcgattatatcaaataatacttttattaaaacatttttttatgctaaattaggatattttatccattaaatatacattttcatccaaataccaaagctttcataatcatagaaacttgatcgttcgtgtcgaatttttatgcattttctgattaaaagtcctatattatgcacaaaatatacatttagaattttcagtaatattacaaatttgtaacagacttattttcgaaacattcagttttcacaaagaatgccgtagttataagttttgcaaaatgcaaatttctatacttttaaaattctattgtgtcaagatattagcaaaaaattacaaaacgttaacaaagcacacaaggacgctaatttctgttatagtctttcttgtcgtttaattacgagagataacttataacattaattttgtcacacggacattacgaaaatattttagatttaaaatttttaggaggatatttttaaaatgaagaaaatcgctacagctactatcgcaactgcaggattcgctacaatcgcaattgcatcaggaaatcaagctcatgcttctgagcaagataactacggttataatccaaacgacccaacatcatatagctatacttacactattgatgcacaaggtaactaccattacacatggaaaggtaactggcatccaagtcaattaaaccaagataatggctactacagctattactactacaatggctacaataactataactacaacaattacaacaatggttatagctacaataattacagccgttacaacaactactcaaataataatcaatcatataactacaataactataatagttacaacacaaacagctaccgtactggtggtttaggtgcaagctacagcacttcaagcaacaatgttcaagtaactacaactatggctccatcatcaaatggccgttcaatctcaagtggttatacttcaggacgtaacttatacacttctggtcaatgtacatactacgtatttgatcgtgtaggtggtaaaatcggttcaacttggggcaatgcaagtaactgggctaacgcagctgcaagagctggttacacagtgaacaatacaccaaaagctggtgcaattatgcaaacaactcaaggtgcatacggtcacgttgcatacgttgaaagtgttaacagcaatggttcagtaagagtttcagaaatgaactatggttatggcccaggtgttgtaacttcacgtacaatctcagctagccaagctgctggttataacttcattcactaattagtgatggctatgtttacgccaacaaggtttcaagagccttgttggcttttttaatttctatgaaaaaaatcgaattggtaaaaatctcaaaatttcgattttcaccaattcgattcactctgtaataaagaataaacaacatacagccattgacacacccaaatttaggcatgtcaaatcggctatacattgataaatttttagttaaagtacttacaaatatacttgccttcaaattctcaattaatttagtcattacaaatcatgacataaaacttacattacatatatcaacatgttccgctacaaaacatattcagtatatgtatagaggatatttattctaagttaaaaccttttcaaattataaccgctacaattataaatgattaaagtgtttcaacatattatatatattccacgctcacattaagttaaacgtgaattcgatgactttttaatacctatccctgtaaaaccatagataattgctataattgcgcataaataacatggtactgtccatatgaaaaattcttcaacagagacatgaagttgattcgtatagtaaatacctgatgttccccatggtattaaaggtaagaccatcgtacttgagtcttcaagtgttcttgataaaacggaacgagagacttggtatttttcgaacaaatctttcattaacacaccgaccataataattacaatcgaagcaacacctgcagcgaatacaagcgcaatacaacaaataacagtaatacatattaaacttcctacagaatggatgcctttagaaatagtagttaataagacttctaaacatcctgctttttctacaatacctgcaaatgcatatccgcaaaatatcgttactaatatttgggtcatactcatcataccaccctgttctaacaagcttttcacactggatgaaatatgagactgatgtatcattgagtcgttaaaaccactaaatgttgctttgaaaccatctgtcattttgaaatgatgattaaaagtccccactataatggcagaaaagcttgatattaccatagctggcactgtagccattttaaatagcaaacaaacaatgatcacaattaagggaacccagacccatatgttaatttgataaatctgtgcaagctctgataacaaagtttgaatctgtttatcatttgaatgccctttaaattgaaatccagcaataaaccatactaataaacctatgattgatgcaggtatcgtcgtccacatcatcgaatgtatatgtttaaatatattaactttagtaacaagcgccgctaaattagttgtatctgataatggtgacattttatcgccaaatacagcgcctgctataatagcacccgcagccatccctggaggaatccccaattgattaccaatagaaataagtgcaatccctgcagttgacgcagagccccatgctgtaccagttactacagatgtaacagcacttataaaaaaggctgatattaaaaaatagcttggattcaataaatctaagccataataaatcaaggctggcactgtgccagaaaacatccaactgcctactataattcctaccgctagtataattaaaattgcaggcattgcagtatttaaacgttctgcaatgcctttttctaaatcttgccatgttaagcctacacgttttgcaatccatgtggcatatgctgaggcaataattaataatacttgaattggaatatcaaaaaacacaaagccttttacaacaacaataaccattacaatcattgtcgaaattgattctaaaaaggttggttttcttttcatcatctatcgtccccttcgcttattgatgagaaacctcttttcttcaatttattgcttttgcataatgctatatccttttctatcttcaagccatcatttattttaaatatttttctaaatcaagcttatctaaaccaatttcttcaactgttaagccttcctcaaagaagtctctctctaaaatggttgatgcaattacaattactgcatctatatttggtgtcggtacatcaataacacgacctaagcttgaccatagtactaaaccatatgcaatatcttcagttaaatatctgctttctacatgatttggtcctggaatttgtgaaaatactgggcttgtattaaacaaacgatttaatggttcatcttctttatcacgttctaaataaccacgttcaatacgtgattctttagctgttgataattcaaaacctaatctacggcctaaattcaaacgttctaattcgattgcatgaagtaatctaactgtatgtttagtaattccttctttatataaagcgaactcgccagcataatcaatgcgaccgacattcaataatgttggtcctggatgcacttcaggattaccattttcaagatttgttttaattaagctttcctcttttactaaatgatcataaatacttgaaactttgtcataacaatcatttagacagcttctatcatatgttgaaaagaagatacgacgtacatttagagataaatcaactgctgcattttcaaaatcgacacgcgtaccatacgtcaacgtattagcttccgctagttgtggttttgtttcaatatgtctatcttctaaaacattcataaaacgaattgaccccattgctgcagccatgttgaagaatatcaactgattatcagttacatgctctgccattacatcagcataatactctatgtatgaagatggaataatcacttgaacaatttcagcatcttttaaaacatattccatatcatcactaatatcagtgaattttacgaaacgttcatcaccttcattattaaaatcaaatccgcccttttcgattgcgttttgaaacttacttatagattgattacgacaatataatttaacatcgtggcctttgctcaccatatctactgctgccgtaactgcgccatttcctgatcctacaattgctattttcataaacaaccctctttctatctttggttaaaattaaaaacaaattatacgtaagacaatataaaaatgatgcgaattcattacgcatcattataaatgttaagtatatataaccttaaattaacctatttaaacgccgacgtccaccaattatttttatttttaataattgtttaataaacatgtttatttttgattatattttgttatagttaaagataatattacaattttcaaaggagtgtctaatatgacaactgaaatgaacgacgtaacaaatcatcaaccgaatcgcaaatccaatgatgagaacattatggcgatgcttatctatttattaagtttattcacatctattattggtccactgattatatggttattgaaaaaagatgaatcgaaactagttgatcgtgctggaaaaaattatcttaactatacgatttcttatattatttggtctatcgttttagtcgttatcactttaataggcgttttcctaattgctaccgatattagtttcattatcattataggtttcatcattacatttatcggtattttatccatattcgctttctcaatattatcttttgtattcacaattattgcgtgtgtcaaatattataatggccaagaatatgtaatacctttaacaattcgatttatttaaacatattacaaataaatatttcctattaattatctgttaatctcattgtaactttgactaatttttattacaaaattagtcaaagtttttttattcttttacaaatcaataacattccccacaagaagcattaattttgttaaagtaactattgtcatcaattcgagatgtgagaataaaacagtcgctacgttttatttataaaaaaagatatagaactttggaggactttattcatgaaaaaattagtaacagcaactacgttaacagcaggaatcggcacagcattagtaggtcaagcacatcatgcagatgctgctgaaaattatacaaattacaacaactataactacaacacgactcaaactacaacgactacaacgactacaacaactacgacaactacatcatcaatttcacattctggtaacttatacactgcaggacaatgtacttggtatgtatatgataaagttggcggagaaatcggttctacttggggaaatgctaataattgggctgctgctgcacaaggtgctggattcacagtaaatcatacaccttctaaaggcgctatcctacaatcttctgaagggccatttggtcacgttgcatatgtagaaagtgtaaacagtgatggttcagttacaatttcagaaatgaattatagtggcggacctttctcagtaagttctagaactatttctgcaagtgaagcaggtaactacaactacatccatatttaatataaacacgatgatacatattgtcttgaaacttaattctagtacatatgtcatcaaaaaactttgagctttcctttataggagaagctctttttttgctatttttcgttgccacctacttatttatatttcctcccatattcataatattaattttttctaatactattaactttaaaactacgttatctaatttaattgatccagtttttccacattacaatattcatagttctacagtgcctaagttatatcacctccatcaaaagtacgcgcttacatcattgatacacaagacatcatgacatagttgtatactgtctaatcttctactatactaagataaaaggagtgatcttttatggaaaaagtttatgttgctggtgcaataccagaagtaggtttaaaacttttacaagaacattttgaagttgaaatgtatgaaggtaaaggattagtcgataaagacactttaattaaaggtgttaaaaacgcgactgccttaattagtttattatctacaaacgttgataaagatgttatcgatgctggtaaagacttaaaaatcattgccaactatggcgctggttttaataatattgatatcgagtatgcccgagaaaaaagtatagatgttacaaacacacctaaagcatcaacaaacgcgactgctgatttaacaattggattagtacttgcagtagcgcgtcgtattgttgaaggggaccaattatcacgtacaactggatttgacggatgggcacctttatttttcagaggtagagaagtatctgggaaaacaatcggcattatcggtttaggtgaaattggtagtgcagtagctcgtcgtgcaagagcatttgacatggatgtgctatacactggacctaatcgcaaagaagaaaaagaacgagaaatcggtgcaaaatatgtagatttagatacactattaaagaatgcagattttatcactatcaacgctgcttataatcctaaaatgcatcatttaattgatacagaacaatttaaaatgatgaaatctacggcgtatttaatcaatgcctctcgtggtccaatcgtgcacgaacaagcactagtgcaagcattgaaagataatgaaattgaaggtgctgcacttgatgtatatgaatttgaaccagatattaccgatgacttaaaatcacttaataatgtagtattaacaccgcatattggtaatgctacatttgaagcacgtgacatgatgtctaaaattgttgctaatgctgcaattagtgccgttcaaggtgagaaaccacaatttgtcgttaactaataattgaatttattataaaaacaagaacccccatatgttgagctctcatttcaacatacgggggttttcatattgttgtattatttttctttcgatttatataagaatttagtttgtccagctgctaatgcatttggcatcattttcataatacgatttctaactgcaacaaataaacaactacgatattgggcaattttaccgatttttctagaacgcttaattacttttgcagtatgtttgacacgtattttatcataacgctgtaatgctttttcaaagtcgtatgcgttaaaacaatttactaatacgatagcatcttccattgcttgtccagcaccttgccccatattaggcgttgtcgcatgtgctgcatctcctagtaaaatagtacgaccataaacaaaagatttgagtggtttcaaatcataaatattatgcaataagatacctgtttcactttgtttgtccaagatctctctaacttcatttggatagtgattaaagtatgcttgcaaatgaggtttaccaaacgaactatatttatgattgttttccttcgagttaattgtaatgaaccaatatgcttgattatttaataacggaacaatacctactcttccttttcttccccagtattcttttgcacaatccggatgctttaaatcaatatcatcaattaaacctctaaagcatgtatacccttgatataatactttactgtcagcatttacagattgtctcactttagaatgaattccatcagcaccaatacataaatcaaatgcttcactctcttgttccgcgaaatgtatggtaactttatctgtctcattatctatatgcgtgacttcatgatttgtaaatattgcatcatcttttacataagatttaataatgtcaattaatgtttggcgtggtaacgtcacattcaatgtattactttttaatttaacagtagttaacaggcgatctttgtcatctaacactgtcattgtagataagatttgcccagcatttttaatacctttagctaagtcatgattacctagttttttaagcacattatctccgataccaatcccagcgccaatttctttaactgactcatttttttcaaagactttaatagtatgaccttgttcttgtaataatgcagcagctgttaatccaccgatgcctgcacctataattgctatcttcatattgtcacctctatatttttcattcttttctattttatcacatgcactattgtttaaaaatgactcttggaactaacgtttcatttttaaggacttaagtgtattatctgcaccattgtacattacatgcacatttagacagtaatattcatttacataatgtacatttgtaacaatgatgtgggatatagcatatttgatgctatatagcgttttttgttaggttaaaatccatttaactaacacactcagaatgtgctaaaggagctcgaaacaataaattgttccagctcctttaagcaccgatgtcttatttataatatgtttgtctaatatcatctttctttataccaaactgcttataggatttatccattaatttggcaattttatctgcccagcgaatgtcactcgcatattgatgttgcgcaggattttctggattccatcgcatttgatataaattcagttgattgttttcaaaatattcattacgaatgaactttgcaccaccaataatcgccttatctggtgatgtccattgttccttttcagcataacttttcccactacgaacagcactactatcgaatgctcctataccaaaaaagttataatagcgtttttttccatctttaatgccttttgctaattctgatttgccgttacctgtttctactaatgcatggctaacaagataaatgacattaacctcatatttttcttgagcttctagaaaaactttccctcgattttctaaaatccccttaccttttagcaattggttaacttcagattccgacattggcactttttctgtgatatccatatacttcatatcattgtctttatgtgaaatggtcatcgctttagcaatttcattattatttgcttcaacaaatttaccatcctcttcttttgtctgtacaatacctttcccttgttgcattgaaacagcctcatcaaaagagtaattcacatcatttttaaacaatttagtttcattcacgatgagtaatacagcaaaaacaactaaaataactatcaatagtagcgttgaaatgcgtaacttgaaattcttcttcatatagacaaaacctcatttttcttacttagacaataaaaaatatgccactacaatcgctaatattacgattaaaaaagaagcgttaacgattactttcatcgttgttctatctctgaacatcatattaaagacaactagactaattgataatgaaacagcaaaaaaagtaatagctaacactaatttcatcataaatagacagactaaacctatgactaataatgtattagaaattacagctgacgtttttaacattctcgaattaatatgcactcaccctttttatttaaataacttacataatcataataatacatgatgtttcataggcctgtcgatgattgattcataatagcacgtgatttttttgtttttcaatattattcatttattccatcaaaaacaccctttttaatttttacaaaaattaaaaaaagtgctcctacactgcttgcatgtagaaacactttttcattgtaatgttattcttctcgagacataccttttagcatattaagcatgtatgttaaactacggttcatgtcgtcatctttcaatacgcccaatagacttcttatagttgtcttagcatttggactcgcttgattggcaacgtgtaatcctttattaactttatttaggaagtcgcttaaatctgatacattgagttcacctaataaaaataccattgaagccatattagataatagccctgtataaatatctttattaagttcaactgcaaatttatttatgatgacttgacgtcctcgaattgcaccatttaaagcatctaatagttttgcatcatctaatgttttaataagcttgattgcttttaatatactatctttattcgctgcaattgcctctgtaacttcatttaaactttctaacttaatttgttcttctgatttttctaagcgtctaattttagaagatattctctcagccattatttatccacctgatttcccgggaaaacataatctggacgttcccattttttctgtacttgaacactgtactgcggatgacgttttttattgacacggaaattattagggttcaacggtgacttaccacgtttcgtaattacctccaaacgacagcttgtacgtttataagatggtgtatccgtgtattgatcaacatcactattagttaataagttaattgcgccaagatctccattttccatcgcatcattatttaatggaatatagatttctttacctttaacacgatctgtcacgtgaacttgtaataccgcttctcctgtttcagaaatcagcttaacttctgcaccttcatgaatgcctctatcttcagcaagctctggagaaatttcaacaaatgcacgtggcactttgtatttaatcattggtgtttgataagtcatattaccttcatggaagtgctctaacaatcgaccattgtttacatgaatatcataaatttcatcttgcttaaagtaattatcaaatgataatgggaataattttgctttaccattatcaaaattgaatccttctaagtatagaataggctcatcagtaccatcaggttgtactggccattgtaaactattgaatccttctaaacgatcataacttaccccagcatatagaggtgttaagcgtgctacttcatccataatttcactaggatgcttgtaattccaatcaaatcctaatctattagcaattgcttggaaaattttccagtcaggttttgaatcaccaagaggttctaatgcttggtataaacgttgaatacgacgttcggtatttgtaaaagtaccgtctttttcaagtgaaggacttgctggcaatacaacatctgcgtatgttgctgtgaatgttaaaaattcatcttggactaccatgaaatctaatttttcaaacgcagcttgtacaaaattaatatttgaatccacaatacccgtatcttcaccatataagtacaatgagtgtacttctccgtcatgtataccttctaccatttcatgattatctttaccagcttttggattcaatttaacgccatattctttttcaaatttagcgcgaatatcatccgcttcaatactttgataaccagtaatcttatcaggcatacttcccatatcactacatccttgaacattattatgtccacgtaatggatacgcaccagtaccaggacgacgataattacctgttactaataataagtttgaaatcgctgtacttgagtcactaccaatgtcttgttgtgtaatacccattgcccaacaaattacaacagattcagctttagcacattcttcagcaaatttaatcaattctgattcaggaatacctgttgcttcttcagcaaaagccattgtaaatgtttctaatgatttgtaatattcatcaaaatcatctacccactcatcgataaatgctttatcgtgtaaatcatgatcaataatatacttagtcactgcgcttaaccacgctaaatccgtacctggtttcggttgataaaaacgatccgcacgttcagccatttcatgttttctaatatcaaacacatgtattttttgtccaaataatttttgagcacgtttcatgcgtgatgcaataactgggtgtgcttcggctgtattggtacctatcaatacagacattgccgctttttctagatcttcaatactacctgagtcaccgccgtgtccaaccgttctaaataagccttttgttgcaggtgcttggcaatatcttgaacagttatcaacgttatttgttccaataacttgtcttgctaatttttgcattaaatacgattcttcattcgtcgctttagaagaagaaatgaatgatagtgcatctgggccatacttttctttaatagatgtaaaattatctgcaatgacatttaaagcttcatcccattctacttcatggaactcaccatttttccttactagtggtttagttaatcgttgatctgaattaatatgtccccatgaaaacttacctttaacacaagtcgcaattttatttgctggagaatcatgtgatggttgtacttttaaaatttctctatctttagtccaaacttcaaatgaacaacccacaccacaataagtacacactgttttagttttcttaatacgctctttacgcatttctgcttctgaatctgagattgcaaatagtggaccataaccaggttctgcttttttagttaaatcaatcattgctgctaatgaaccaggttccgtatcagtcatataacccgcattaccttccatattcacttccatcatggcattacatggacataccgtcgcacattgaccacaagatacacatgaagactcattaatcggtacatcattatcccaaataacacgtggatgttcacgatcccaatcaattctaatagtttcattcacttcgatatcttgacatgcttctacacaacgtccacataagatacattgatttggatcataacgataaaatgggccgtaatctttttcgtatggcttctctttatattcatacgtttgatgctgaagcccccatgcatccatcgtattatgaatttcacaatcaccattattataatcacatactgtacaatacagcatatgcttttctaaaattcgatcaagcgcttctttttgagcatctttcacatcattgttcacagtatttacagtcattggacgatcaatcaccgtactacatgaacgttcaattttaccgtcaatctcaacagtacatgtatcacatgtttgaattggtcccatcgactcgttataacaaattgaaggtacaaaagtatcttgtgatttaataaattcaagtaaattcgtacctggttctacaagataatcttttccatcaagtgtaaccaccaaatgttcttgcatattactcaccccgtctatatatatattttccgtaaatgacttttaataaattgcctaatttccacctaaaataacgatgccccacacatctttcagatagaattaatttaattgtattactttatgtactagttgttaagtaaaattttgtattttgcctttttacaatcatttttatttgaaatattttgcgcgaaattaaatcatctttttgtttaattgaaaataattatcattattagttttccaattatctgtttcacgcttttcagtcatatctttcacaaccttattaatgacaatacttaataatcacctcacctaaaaatcgttatactatttataaatacccttttcctgaaaattaataacccaagtttgataaatatctactatcatttagaaggtaatatttatctttaaattaaatttgtaatggattaatttataaaaatcaaatcaggcattaaataaaatagcccataaatacaaagtgttatcaccttctatttacgggctattagttctattcgttattctatttacagatcattctatctaattaatttgtgtacaattttgataacttattttcccttagtttactactctagattatcttttaataacttagtactttcagcttttgactgctcactaggaatgaagtagtacaatccgtcactttgaatgccgccttgaccactcaattgatgtttattaatcgtgtcattagcatctttataattgcttctaatcgtattcaaatcacctaatgttaaatctgttttaacattattttgaatttcattcattagactattaaaatgtgtaatcgatgatggacttgcaatcttattagccatcgcttcaagtacaatttgctgacgttgttgtcgaccaaagtcaccaccagcaccttcttctttacgacttctaataaacttcaatgcttgatcaccatttacatgtgtctgctgtccttttgtaaaacgaacaccatcaacagtgaatgtatcattacttactacatcaacaccgccgatgctatctatcatattatgcaaaccatccatatcgattgtcgcataatgatcaattggcacattcattaatttttcaagtgatttaacagccatatttggtccaccatatgcataggcatgtgcaattttttcagtagtaccacggccaacaatttccgctcttgtatcacgcggtatacttactatttcagttttcttcgttttagggttgatagataaaatcataatactatcactacgctctccgccaccctttttcttacgatcagcatctgaatcgacaccaaataaagcgattgtgaatggatcaccatcgtttaaactcacttttttatctcttaattctgaatgattgcgatctaacggattgtgtatcttattaccagtaataaaaattttagcagctacatacacaacagctacaatcgctaagattactaaaataccgaatacccataaaaatatttttttcggtaggctcattttacttttagacgaacgtttcaatcccaccactcctttactattccttacatactttgtctgttttctctatttattatatagtaaaataatttttttactatacttctgtagacgtataactattttttatcattttttatctctagagaatatctatctgtatttttgataaccaccatttgcatttaaaattttaagtaccgtttcatgacatgctttattacttataataaaaggtgcaccctttaaatgatcaattgccttaccatctaaagtcgtcatttttagattcaatagttctgcaaataaaaactgtgcagcaatgtcccaaggtttaggatttgtattaatatgtgccccaaattgaccttttgccactcgcatagaatctaatccgcaagcaccaactaaacgataactaaatgaggcgtcaaataaatcttgcaccgtatctagattcatcacttgtgcattaaacgatataatagcgtcttccaattttaacgatggtggttcttccatcttaattccattacaaaaagcaccttctcctcgtattgctttataaagctttttatgcggataatcatatacgtacgataacattggtttaccttcataaaaatacgccaatataatacaataatcttcttgctgttttactaaattggcagttccatcaatgggatccataatccataaatgattaatttcattcgtaatcattgcattacttttttcttccgctaatagttggtgttccggaaaatatgttgctaaaaaattgttgaaattgttgttgaatctgtttatctacatttgtaactaaatcaaatcgatgacgcttagtttctgtagtcatttccataattaattgcggaataacattgtctatttgtttcaaccacgaacatattaacttatctatttgctgtaatgttttatctgtcatttcgtccaccacttctcatatcattatcattttattattaccctaaattaaaagaatcaacaatacaactgaagacttcttcattttatgcataaaaaaatcggctagtcacgtgctagccgacaaatagaaaggaaagtaagtaataaatattgaagatgttgtgatgtaacttgaacgattaaaagctatctgttatatagctctacccctttgtttaatcgctccccctgttacaagtaatatcatagcacaatcttttttaaaatgtaagcgttttccacaaaatttttccgatttttttaaaaagatattgaaaatgtcctcattgtcactcttatgttatactttgtgtaatatatcatcttttaggaggtggctgtcatgaataaagctgaaaggcaaaatttaataattactgcaattcaacaaaataaaaaaatgaccgctttagaattagctaaatattgcaacgtatccaaacgcacaattttaagagatattgatgatttagaaaatcaaggtgttaaaatttatgcgcattatgggaaaaatggtggttaccaaatacaacaagcacaatctaaaattgcattaaacttatctgaaacacaattatcggccttatttttagtgcttaatgaaagtcagtcgtactcgacattaccatataaaagcgaaatcaacgcaattataaaacaatgtttaagtcttccacaaacacgcttaagaaaattgcttaaacgcatggacttttatattaaatttgatgacacacaacatatgacactcccaatgctgttttccgacattttaatttattgtacagaacgaaatgtgatgttagtagatcatagggttgatgataatattaaagctgaaaacgttatatttattggccttttgtgtaaacatggacattggcatgcagtcatttatgacattgctcaagacaaaactgccgaactcgaaattgaaaatattatagatatttcgtattcattcggtaagacgattcaaaccagagacatatccattgataactatcatcaatttttaaaccccatcgattcctaaaaaacagcagtaagatgattttcaattagaaaatatcttgctgctgttctctatttatacaatacttcgtattgaatggcttcgctttcctagggtgccgtctcagccttggtcttcgactggcactgctccctcaggagtctcgccattaatactacgtattaacatgtaattttactttgaaatacttaaaaaaataaaacactttgcccaacttacactaccaatagaaactgctgttagaattcctcaaaatgatatttcgcgatatgttaatgaaattgttaaaaagatagctgatagcgaattcgatgaattcagacatcatcgtggcgcaacatcctatcatctaaaaatgatgttaaaaatcacctcatattcatatactcaatctgaattttctggccgtagaatagaaaaattacttcataacagtattcgaatgatgtggttagctcaagatcaaacaccttcttataaaactattaatctttttagagtgaatcctaatactgatgcgctaattgaatctttatttattcagtttcataataaaatgcatatcaaaaaagctgatttctatcaaataattaatagaaatcagcttttttcattgcctaaaaacttaatgtcccgacctctttatctacgcataaatacttattactgatataacgaaagaaacaaaattatttgctatatgtaatgcaattgttgaacctaggtttcttccagattttaaataagtgaaaactaatatgatggatagtatgagatatggaccaaactcaaacggcgactttgcatcagtcacatgaataaatgcaaataagaacaccgaaacaatactcatagctataaaattaaacttcttacctaattctccaattaaaatatgtctaaatacgatttcttcaactattggacctacaatcacaattaataagaatgctacaggtaaaaatgcaggcacttcaaacattttatttagctcaagttcattggctgtttcactatattgcaaatgtttaggtagaaactgtgtcatatattcatatgtataaattaagatgagagcaataatatacgttattgacaatctaagccaatattttttgatatacgcaaaaccagctcgaagccttgatggcatcacttttaaatgaaataaataaaatgcgccaatcccaatcgtatatgctaaagcttgtgtgatagtcgctacaaatatcagattactatcgatttcataataaccaaacaaaattggtcctatgtaagctgcaattgtgagtgcataaaatataacacctataattggaattataagcaaatctctccatgctatatctttaaacgtgtatttctttttttcattttccactgttatatcctttcctgtttaataattgatttttggaggtacttctacatgataaacgaaactaagtatatgagacaacaaattactaatttgattcaaatcattgatacgattaaatataatactttaatgacagattggaacattcaaacgcatatttataaatttaaccaaatagttactaatgaattgaataagttcaaaggctttgaaacatcatatataataaacgaaaatcaagtttcctattatgaaattataacactacttaataaacgtcccctccgacaagtcgactatggtaacaaaattcaatatcttaatttttatcatacagaactatctaacgcattatttgcaattaaatttgcccattaacctatttttcataaaatgtcatttaaacaagttatttattaaaattcactttattacataaattatacaattaaaaagtttcttcaaattgtaaagatgcattaatcgagttataatcataatgattaagatggtagatttagtcttatataactacatttactaagatttaaatagatgagtacataatgtataaattgggaatatacagtatgacttacggtaatatatcaatatattgatatattatttgcacatgggagtatgctattttttatctatacatcttaaaaatatttacagttttataattcaatatcattaaacaaacaacatattcagcttatttttcattctcttacgttacaagttgtaaataccatcgcgttaaacaacaatagccaacgctaataaaatatattgcgttaaagtggagtgattaatatgtcaaacgtactaacagaaatagatagtcaatatccatatatgactaaaaatgaaaaaaagatagctaaatttatactaaattcacctcaaaaggtgattaaaatgaggtctcaagacttagcaagcttattagatattagtacatcatcagtcattcgattcagcaagaaaattactgatggcggttttcacgacttgaaaataaatatatctaaatatgttcctaaagcatcatcaatttacaatgttgaattaatgaataacgaaagcacagaatctttaagaactaaactccatacacgtactacacgcgcacttaatcatgctaataacgaattaaatgataaaactattgatcaaatatgtcattgtttaaaacgttctgagacgatttttatatatggttttggcgcatcttttgtagttgctaccgacttataccaaaagttatcaagaataggtcttaatattcaacttgttcaagaaacacatatttttgcaacattattagcaactcacaattcgaacgacagtgttattcttattactaacaatggtacgcaaagtgaaatgcaatcaatggttaaagttattgatgactaccatatacctataattacaattactagtacaagggataatcccgtagcacaggcatcaaatattgttttaacttatgggaaaactgatgaaaatgagatgcatatgggagcaacaacttcattatttgctcaaatgttcactattgatattttatattatcgttatgttgcattaaattatcacgcatcattagatttcataacacaatctaaaatggctttagataactatcgtaaacatttatcaaatattaactttaaacattaacagtcttatataaattctttaatcatgtcatataataatttatgcatcattttcaaagcttacatgtcttttatcttgtataacatacgcatatgaccaatgatttgataaggccattcaatttcttatattaaaaactaacgcagttgattaacggattcattccatatatcaattgcgtttgttattttaataatgctattttttattttaaagcccacagtaaaaactaacgataatattgccacttataagtttttcacactacaacttcgatttaagctatatttataaaaaaatgcgcctactcataacattctttggctatttaactttaataagctagggccaagtttgtcataaaataagcgcacattataatcatactattttgcttttacattatttttattatatctaataaaataataaatcgttacaatcgttaagaagatgacaccaataagcactgatattctagtttcaacattaaataccataccaaccaatactaatattaagaataagattgttaaatagttagttactgcgccaccaggcattttgaatgggtgaccttccaattcttcagggtgtaattttctaaaacgtaagtgactgaataaaatcataaaccaaggaatcatacctggtaaaatagacgcactataaacgtatacgaaaatactcttcgctccatcgatatataaaggtaaaattacgtttaataaagcaccaattaaaataccaagagatactgctacaacagtgtacaatggtacaccatttctcatgattttagtaaatatttttggcatttcacctttatgagcaagtgtataaatcatacgactcgcactgaaaatacctgagttacatcctgacattgctgcagttagtacaacaaagttaattaatccagctgcaaacgtaataccgattttagcaaatgttgcaacaaacggacttccaatgtctcctaattgattccaaggatacactgaaacaataacaaaaatagcacctaaatagaaaattaaaattctccagataacaccattcactgctttaacgatatttttctgaggatctttagtttcacctgccgtaatacctatcagttccacaccttggtatgaaccaattacaattgataatgcaaagaagaaaccaacaataccatttggcataaatccgccatttgtccatagattagaaatacctaccgcatggccaccatttccaaaaccaaagaaaataagaccaaaaccagcaataatcattaaaataattgttacaactttaattaaagcaaaccaaaattcaaattctccaaacgcttttaccgagaataaattcgctgccattaataataaaatagcaataacaccaggaatccaagttggcaattccgggaaccaaaacttcatatattctcctactgcgatgacctcactcataccaacaacaatccattgaaatatattactccatgctgtcatataacctgctgcaggatgtatataatcacttgcaaatgttgcaaatgatcctgttgtagggtttaaataaatcatttcccccattgctctcatgattaaaaataaaaagatacccgcaattaaatatgcaaggataactgatggccctgtccatttaattgtacttgtcgcacccatgaaaagccccacgccaatcgtaccaccaagtgcaatcatttgaatttgacgggcactcaatcccctttgtagttcattgttctccataacttcttaccccatctctgattgatactaaataaatccataaaaaaacttattgccgtaattatactataaatcatcgattttggtacattaatatttgcataccatgcaatcgtttacagaactactatagcaggcttttgcaactttgcaaacaattattttgtgatttttctaaaaaattaaaaaagttgctcaagtaccgttgagtcacatacaacttcagctattctcggtaattatgatataattttaataatattaaaaaggagtatatcaatgttaaaacaaatactgctacgtgctacaaaaatatcgatactctttgctgtagcatttttcatcataaattatatcggtatggaaaaacctgacatcctatatttagttggaagaactattattgcaacacttgttttcatactcatttgtcttacagtatttactattattaattctccagagcgcaagattaaactcggtacgactttaccgattgcattaattattggtatcattttcggcgccatatttttaacggtacaaatcggtgtcatcactgggttaatcatcggtgtgattgctacgtttatttgggaattgattgaaaaaaataaaggaggtcgttcgtcatgacaacagcattaattggtgtaattgtattaatcttactaattattagctttgtgccaaactaccgtgctatgaaatcagcaaaagaacaaggaagtaatgcaacaagagctacaattatggtaggcatagatattatcttaattgtacttatcatcgtgacgttattattaaaatatatgtaactatttaaaccaccctatctcatacataaacatgaacgttctaccatttcacatacatatggtcgtccatttaatgaggtaaggtggttttctcgttaaagtttaccttgtaatagtaaaaaatagccaattgttgcgagtattaagtaaatcattgaaccaacaacaaaagatcttacttgcacgcgaaatggtgtctgtttattaaatataggaccaatcaccaaatttccaacgcctaaaattactggaccagctagaaaaaacaatataatgtaacccatcatgatacgcctcctatttcgtaaagaaacgcgctacaatttgatcgtaatcaatatcttttgctacataatctacattagaaaagtcctgtgcgcttgtcattttattcgtattaacaataacatctaatccagctgcaatcgcggctgttgcaccatttacagaatcttcaatagccaaacattgtgtcggcatataatttaattgttgtactgcagataaatataattcagggtcaggtttaacttgttcaacatcttctctaccaacaactacctctatataatcgtctagacctaatgctttaaaggtgggcattatttccgctttcacactacttgtggcaattgccataggaatgtgacgttgctttaaaaatgccatcaatgatttaatcgtatcaatcatcggtaatgttgtactagtaagatgatgttcttcataaagtttatctttattttccgaaccaatcgctttaattaaatggtcatgcaaatctgtagctgctcctccaatagaagaacgataaaaatcaatgcttataggatcggcattatgcatctctaaatgtttattaataacattaaataaatgttgttccgtatctattattgttccatcgaaatcaaatataactgctctatacatatatttactcctctattttttctctttatcaaagcttaacatagtccgatgaccacttcattctattagtgcaattataacttttttgaccaatactttgctaaaataggccctgttatattatgaatgaaactaaacactgcgcctggtactgctgcaattggattaaaatgcaatgctgctaatgacacagctaaaccagagttctgcattccaacttcaatactgactgctttttgatcttgtcgatctaattttaaaagacgagctaaccaatatccaatcgtataccctaatacgttatgtaaaataactactaaaaatattaataatcctgtagttaagatttggtgcttactgccacctacaactattgctaaaattaatgaaatagcaacaactgatataattggcaaagctgtagaagctttttcagcaattttacgattaataatttgcaaaacaatacctaaagcaattggaattaatacaacttgaacaactgaccacaacatactcacgaaagatacttccaaccattcatttgcaaatagatatattaacgcaggtgtaacgaatggcgctagcaacgtagagaccgtcgtaatagaaacagaaagtgctacgttagctttggctaaataactcattacattacttgatgtcccacccggacaacatccaactaatattacgccaacagcaatatcaggtggtaaatgaaaagactttgcaattataaatgctaatgtgggcataatactgaattgtagacagacaccaataattactgctctaggtgctttaaagaccattttgaaatcattaggtgtaattgttaatcccatacctaacataacaataccaagtaaataaggtacccatttacctaatgtcgcaacatgttgtgggaaaataaatccaataacagctgctactaacatccataccaaaaaactcttcgtggcaaatatactcaatttttgaaacattgttaacacatcctcgtcgataatattgaaaaatattaccataagaccagtaaggttacaattacttttctgaaaattaagattatttagtcattctcttcttattgcaaatattttatcactgataaacaattattttaaacttcattcaaaagtcttagtgaataaagaaaaaaagcgtggtaaaatcaacttgaacaaaattaagtcacctttataaatattaaacgtgtatttaatgccatgtattcctcgggaggtcctcacatgttaattgataaattcgaaacatacatcatcaacatcgccggtttaaatgaccgtactactagaaaaaaattaagtaagttatgcaaaagtgtacaattttgtgatgcgttgcaattctcaataaacaaacagtttaatcagtatgtattagaaattagcttaccaaagcaacaacttccatacttcatttcatttttaagttttcatcagtatagtattttccaagtactttcaccaaagaaaataaatgaattacttgattctgataatttatatcaatctgcaaagcgtttcgatatcaatattgatggcttgcaagatgctttcattaaagacaaagtcatcgatattatgaatatgttccaaaatcacactgatatcacttatacgttgaataagtctcatgcacatattatatgtacgccagaaatatttgctaaattgttacatacgattgcaactagaaatatcgacattctatctgccaattatagatcgtcatctatgagcaaagctcgtatatcataataaaagacacatctatacgatgatcatttacaatgattgcgtatagtgatgtgtctttttttgtattatttatcttcggacgattgatcctcaaccatttgttcaaatgcttcacgaacttgtggtactgtcatacctactacaacttggatactcttaccactctttactaatccgtgtgccatttgttgatgcgtgaaatattccgtatctgcaactttactttcatcataaacagttaagcgtaatcttgttgtacagttagtaacatctttgatattttctttgccgcctaaaccgtcgaggtaatatgcagctttgtcttcgtattcattaccagttgaagcacgtttagaatctacgctatcaccttttttatttttgtaatcttgcttagaaaataatttaacttcctcttctgttttcttacgtccaggtaatggaatatcaaatttcaaaattaagaatctgaataagaagaagtaaatcgctacaaatatcagaccgataataacttgtgcaacataagtaccccaatgttctttacctaatggcaaccagtttgttgaaataaagtctaataagccaccacccatgttacctacaacaccaaatgcgtacattaaagtatccattgatgctgctaaaactgcgtgtaaaacaaataagtatggtgcgatgaataagaatgtaaactctaatggctcagtaatacctacaacgactgctgttaatgtggcaggaataagtagtgccgccacctttttacgattttctttaggtgtcgtagcatacattgctaaagcaatacctaaacatccaaatactttcccatttccttgaagcataaagccataagggaattgctcttttaatggcttagtactcttagcaaactcatttaaatgttgtaaccattcagctttcaagccgtgattgactactactggtccaacttcaattggtgcataaataaagtgatgtaatcctgttggtattaatacacgttctaagaagtgatacaaccatacaccgatatagcctgaagcaatgataaagtgttgcattgaaccaataccgtgctgaacagttggccaaataacacaagtaattgctgctaatggtaacatcacaaaaaatgaaatcgtaactacaaatgttaaaccttggaatacaccaaccatttctggtaatcgtttactatagtatctattgtgaatccaagtaataatagctgaaataataataccacctagaatattcgtatccaatgtggcaatacctgcaattgattttaaaccaggtacattttcaacgcctttttctaaattagcgccaaacgtatgtggccattgtgttaaaatggcatttataaatgtattaaacattaagtaacccatcaatgctgcaagtgctgcatgacctggtgcttttttagctaaagaaagtggtagacctacaacaaatacaacttccatatgcgtaaaaataacccagccaccagattctattactgaccaaaatttaaaccaaaacgtatgttgatctgctaaactccccatgattgtaggatttttaaataatgtcgcaaagccaagcactatcccaaagaaagcgaacattaataccggtacaatcattgcactaccgaaacgctttatcgcattcatcttctattccctccatatcatctttcctaacaatacatctaattagattcatttataaatagatgtcttactatttaaatataatatatagtaaacgcttacacacctacaacgacattgacgtattttgaaagtattttgtataatcagattatcttttcatatagtgaaaattttttcacgaccttatatatgacatcgttgtatttgtaatacattcgttttaaacgcataatcaaacctatatcaatacacaaatatatataatgacatacaagattttaatgtaataacgatctattacacatttattttcaaggaggttgaatatgtttttagatgaacacattaatcgaaactttgataaacttaatgataatgatttacatatcgctcactttatcaatacacatatagatgaatgtaaaaatatgaaaatacaagatttagcgcaattcacacatgcctcgaatgcaaccattcacagatttacacgcaaattaggttttgacggttatagtgattttaaatcgtaccttaaatttgaaagtaataagacacaccaattaccttctaactctatcgatagtttcaaacaagaaatcgatagtacattcagttatttagaacgcgttgattaccagcttcttactaaaaaaatgcatacagcttcaacaatatatttgtatggtacagggcgtgcacagttaaacgttgcttcagaggcacagcgtatattgttaacgttacataatcatgtcattgtacttcatgatgaacatgaacttaaaatgattttgaacaagagtgaacctaatgatttattctttattatttcattatcaggtgaaacacatgaattattagaagtaacaaacttgcttcaacttagacaaaaatactttatttctgttactacaatgaaagataatacccttgctcaaaaagcaaattacaacgtctatgtatccagtaacacattctacttaactgatggtacagactattctagcttcatcagttatcatatattctttgaaacacttgtaagaaaatataatgagtatttactacataatgatatttcaaattagaaaaaaggaagttatgatttaatggccttgagcctatcataacttccttttatcattttattgttgtgttgatgtttcgataacgtggtacatcttatcaaacatcaattcgaaaccatgcaccatggcatcatgatattcttttttcttttgcttgtattctaaattagtaaatcgtctttctttttcaactaatgaacgataataaaatagcatttgggtgccacctgtttcacgttcaaaaaattctacctcaatgacatcttgtgtttcacttagtccaggcataccgatagtcatcttaacgtattcatccataactaaagattcataaatgccttcaatcacatttactttgccattacgttgttgatctacaatacgatatttaccgccttctttaacgtccgcttcaatctctttattcgttctggctgatgtcataaaccattgtttcaacaaatctttctttgtccaagcttcgtatactaactctggagaaaatttataaagcttttcaatttcaacttcgacatgttcattctctacattaaattttgccactgttgtccacccactttcgctcttacttttattttaacgtatttttgctcagttccaaacatagatgatcatcatttttaaaagattagcgttatacggtgagtacaacatgatctgttaatataacaagccaccttacttggctacatcgatatattgttaagcattaatgtttcatttcttgactagtgttcttttttagctttggaaaattaaataaaatcgcaataagtccgcatacacctaataatataggataaatgctgtatgggaataacattaacggtgaaataccagctacaccagccgctgaaatgacttgcgggctatatggtaataaaccttggaagcagcctccaaatatatcaagaatacttgctgatttccttgaatctacatcatattcatctgcaatatttttagctaaaggacctgacataataatagagatggtgttgtttgccgtggcaatatctgcgacacttaccaaactagcaattcctaattctgcgccacgctttgatttcactttagagcgaacaaattgcaacaaccattcaataccaccattgtgttgaataataccgactaaaccaccaattagcaacgcaatcatagcaatatcttccatgcttataatacctttggacactgcatctagtagccccatccaaccgaatgaaccatctatgagaccaatgattccggctaataatgttccaccaatcaatacgataatgacatttacacctaataatgctaataccaatactaaaatatacggtacaactttaattagattataatcatagtttttagcatgatttaaagaaatgccattcgttaagaaatacagaataataatcgttaaaatagcacctggcaatacaattttaaagtttactctgaatttatctttcattttcgtatgttgtgttctaaccgcagcaattgttgtatctgaaatcattgatagattatcgccgaacattgcacctccaacaactgtagccattgctagcgcagttggtacatctgtcgcttgtgcaaatccgtaaccaacaggtgctattgcagcaacagtccctactgacgtccccatagatatagaaacaaacatacaaatcacaaacaatcctacaataattaaattttctgggattaatgatagtcctaaattaactgtcgactttacgccacccattttttcagctgtatttgaaaatgcacctgctaaaataaaaatcaacatcattaaaataatgtttgaatggcctgcacctttcgtgaagacctcaacttttttagcaaatgattcttttcgattcattaataacgccacaattaccgttatcgtaattgcaacatttaatggcattgaagtaaaatcacctgtgataatacctacgcctaaaaacaacgccacaaataataacaaggggaataatgcccaagcattgctctttttatgtacttccatcctttttacctgctttccaattaaaaatacctctttctcacaaacgatgaagaaagaggttttcatgtgctttacctgcttatcttcaaaccattacggttactggaattggcacattcgagatgttgccgaggcttcatagggccagtccctccacctctctagataagtgatgcttatttacgtttacgttacaagataatccttagtacgtcaatcataaattaatcaggagtcgtataatatttttcataaataatcattgctactgtaataataatcaaaacaataatgctaataacaagtaaaagccaccatttaagcattaatgcaataaaaatgaacacgatagatacacttactaatattaatgatatgactttaaattgctgtgcgctttgttcagaaataactttcaactgtttgtttgatggacgcgtattttttatactgattcccagtatattttctaatatttgaaccaatacgatacttattgcaaatataataattggtaaaacatcatagctccctatagttaatgtataaattacaaatccaatgtaaagtaaccctgagacaaaggataaaaagtatgcgacgtatttgttaaacttaatgatatgctttttaatattttgatgggtaaaccatacattcataataatcgcaactgctacaaataatgtgaatactatatataatggtaatttttgttcaggaaaaacagtcgctattccaaaagctaatgctaaaatcaaaaataatatagctctagatactattaatgccataataacaacccctttgtttaatatcgagtttgcaaatttacgtttatcagcgtttctatgatcagtacttctacgggtagcgtttctatgtaatttacatcatcttaacatataaatacttcgctatttaattgaaaacatatcctattattctttgtccgttctgacgtttaatatctaaccttaggcatttcacttgttaatgaatttaactttcttccactaaccgtccctaaacccaatcccgcaacagtttttaactttttcgttgttgtccagacatcctcattaagaaagtttattctgcttaaaccttataatccacaccctgagcaaacgctccttatgacggagtattaaaataagccgataaagatacacacctttaccgactatttaaaatacacttcaccaattcattttaatttaatggattgaagtaactaaattaatattatattgttcaattaaaagcttcatacaaacctaatctatttgcactcctccgctaacaccgaacacttgtccggttgtataacttgattcttctgacgctaatagcacataagttccacataactcaacaggttgacctgcacgacctaaaggtgttttttgaccaaatgttgggattttactttgaggttgcccaccagaaatttgtaatggtgaccagaatggaccaggcgctacacagttcactctaattccttttggtcctaattcttctgaaaaacttttagttaatgaaataattgctgcttttgaagcggcataatcatgaagaattggactaggattataaccttgtacagatgatgtcgttgtaattgacgcacccggttttaaatattccaatgctttttgaactgtccaaaatagcggatagacattcgtttcaaatgtttctgtaaatgcctcagttgtaaatccatgaatatcatcatgatactgttgatgtccagcaactaaagtaacattatctaagccacctaattgttgatatgcttgttcaacaaggtcatagttgaactgctcatctcttatatcaccaggaattaacactgccttttgaccactttcttcaattacttggcgtacttcttgtgcatcttgttcttcactcggaagatagttaatcgctacatctgcaccttctttagcatacgcaattgctgctgcacgccctattgctgagtcaccacctgtgactaacattttatagccttgtaagcgttgatgaccttggtaagacgtttcgccacaatcaggtgctggcgtcatttcagattgtaaacccggtacctcttgttcttgtttttcatattccgttgttttaaattttgttctaggatcttgagttgccattttttaacatctccttattcgcttaatggttattatttacccaatcttcctaggaacttaatcatgattacactaaaaattactttcttctttataaaaacaagctcgaattactcatgcaatagtctctttacaaattcaacaaaatactcaggtactttttccagaatcctttcatccggtttatattgaggatgatgtaaatcatattcactatgagaaccaattaacgcaaatacacttggaaaatgttgactataacctgaaaaatcttctccaatcgtaagcggctgttccatcatttccaccttatatccaacatgttgggctactgcaattgctttatgcgtcaatgcctcatcattcatcacagcgccaggtaaatgcgtataatttaaattaattttcatattatatgcttgagccaatccgtccgcaatatcttgtaatcgtgtttctacaagctttcgtaccacaggatcaaaactacgcactgtgccttgtacatacgcatgatcagcaatgacattccaagtattaccacatgatatttgtccaattgttactaccgcttcatcaaacgcagatagatttctactaactatggattgaatactattaatcaattgcgccaacacaataactggatcattacattgttccggctttgcagcatgaccacctacgcctttaatatgaaactcaaaacgatctactgctgatgtaattgcccctgttttgattgcaaatgtacctaccgaacgcgatgggtcattatgaaaacccaatactgcttgtacatcttttaatgcatgtgtttcaataattttaaaagcgccatgtcctagttcttctgctgattgaaaaatgaatttaacacgcccagtaagagtgccctcaatttcttttaattttacagctgtagccaaaatactagccatgtgaatatcatgaccacacgcatgcataacaccttcattttcagatttaaaatcctgttcaacaagctcttgaatcggtaaagcatcaatgtcagcccgaacagctatacaactcagaccttgtcccacttcagcaacaagcccagtcgcaagtggtaagtctaatattctaatatgatgttctgttaaaatatctttaattttttgtgtagtcttaaattctttatcggatagttctggaaattgatgaaaataccttctccaggtaacagcttgatcttttaatcccatcggtcattccccttccttaagtcaatgatatgttgtctaccctacgatgatcatctttgactattaaacgatgatttcacaacaatgtactcttgttaattgctttcgttaatgatagacagtggtttaataatatcgtaacactgttgtcaaactattctaacttttataattgagactctatacaaaaacgtgttctcgaatatacttgtttttacaaaccacaaaaagctctaaacattagtttaaaccaatgcttagagctttctaattattttatgctttaaaagatactgtgttatctacgatgaccttaccgtctttaataactttttctgcgtgattgataccaaaatgatatggaatatattcatgatttggtgcatcccaaattactaaattagccttatcacctgtgttaattgtacccgcgttaatgtctattgctttagcagcattgaccgtaacagcattccaaacttcattaggtgatagctttaatttcaaggctgcaatcgccataacaagttgtaagttgtttgtgacactactaccagggttataatcagttgctaatgcaatcgcaccgttattgtcaagcatgcctcttgcatctgcataatcttctttacctaaatagaacgtcgttgcaggtaagaggacagctacagtatcactatttcgcaacttttcttttcctttatcactagaagctactaagtggtctgctgatattgcttgttcatcaattgctaattccagtccgcctaacggatcaatttcatccgcatgtattttcactttaaaacctgcttctttggctttttgcatataatgttgcgattgttctattgtaaatacacctgtttcacagaaaatatccgcaaagtctgcatattgttttacttccggaagtaacgcaatcatttcttctaaaaatgcctcatttgaacttgcctctttaggtacagcatgaggccctaggaaagtatgtttcatgtctaaatcatatttctcagctaaacgattagacactttcaattgcttcagttcattttctctatctaatccataaccactcttactttcaactgcaagcacgccgtgtttaatcatagtaagcaaatcatgctctgcttttttaaacaagtcatcttcggatgtttctctagtagcattaacggtagataatatgccaccacccatttctaatatttcaaggtaagacttaccttgacgttttaatgacatctcatgttctcgagatccaccaaatgttaaatgggtatgtgcatctactaatgctggggacactaccttcccactagcatcaatcgtctcagtcgcatcgtagtcatctgtatgtgttccagcatatacaattttgccatctttaatgacaactgtaccatttttcacaacatttaattcatctaattccttacccttcaaaggtttatctgttgatctcggtaaaattaattctgctatatgattaattattaaatcattcattacttatcacctgctttatcaatcattggaatatgaatacctttttctttagctgtttgaatagcgatgtcatagccagcatcaacatgtcgggcaacacccatacctgggtcagtcgtcaatacacgttccaatcttctttcagcacgctctgatccatctgctacaacaaccatacccgcatgaagtgaatatcccatgccaacaccgccaccgtgatggaatgaaatccatgaaccacctgcagctgtgttaatgagtgcattcaatacagcccaatcaccaaccgcgtcactaccatctttcatactttctgtttcacggttaggactagcaactgaaccagcatctaaatggtctcgtccaataacaattggtgctgaaatttcaccgtcacgtacaagacgatttaaagctaagcccattttcgctctttctccatagcctaaccaagcaatacgtgatggtagtccttgatatgaaattttttcttcagctaaatcaagccatcttaataacttttcattttctgggaaaagtttgcgcatttcttcatccgcacgctcgatatcttttggatcaccactcaacgcagcaaagcggaatggccctttaccttcacagaataatggtctaatgtaagctggtacaaagcctgggaagtcaaaagcatttttcactccgttattgaaggctacttgacgaatattgttaccataatcaaatgctacagcgccacgtttttggaattcaagcattaattcaacatgctttgccattgaagcttgtgacagttcaacatattttttcggatctttttcacgcaatactttcgcttcttctacagagtatccttgtggcacatatccatttagcggatcatgtgcacttgtttggtcagtaataatgtcaattttaaatcctttttctagaatcgcttgatggatgtctacagcatttccaactaacccgattgataatccttctccacgttctttcgcctcttctgctaattttaatgcttcatctaaatcagctgttttaacatcacagtatttcgtatcaattcgcttatcaacacgtgtttcatcaacatccacgcaaattgctaccccatgattcatagtaattgctaacggttgcgcaccacccataccacctaaacctgctgtcagtgtaacagtgcctgctaaatctccattaaagtgttgattacctagctcggcaaatgtctcataagtaccttgcacaataccttgagaaccaatatatatccaactaccggctgtcatctgtccatacatgattaaaccttttttatctaattcattaaaatgatcccagtttgcccattcaggcactaatactgaatttgaaattaatacacgtggcgcttcttcatgtgttttaaatacagcaactggctttcctgattgtactaacattgtctcatctgattctaattctcgtaacgttttctctattgcttcaaaagcttcccaattacgtgctgcttttccaataccaccataaacaactaaatcttctggtctttcagcaacttctgagtctaaattgttgtataacattctaagtactgcttcttgttcccaacctttacactcaatactcaaacctttttttgcttgaatttttctcataaaattcgctcctgttctttttagaagttaattccactaaatttaaaacgcttacattattatcttcaatattcattatagtatgttaaaatatagccaacaaatataaataaactaattatccatagcttgaatctataaataaaaggagcaaaacacatgaaaattattcagttagaatacttcttggctatcgtgaaatataatagttttactaaagctgcacaatttttacatattagccagccatctttaactgctacgattaaaaaaatggaagcagatttaggttatgacttatttacacgttcaacaaaagacatcaagattaccgaaaaaggaatacagttttatcgttatgcgagcgaattagttcaacaatatcgatccacgatggaaaaaatgtatgatttaagcgttacatcagaaccaaggataaaaattgggactcttgaatctacgaatcaatggattgcgaatttaattcgaaagcaccattccgactaccctgaacagcaatatcgtttatatgaaatacatgacaaacatcaatctatagagcaattactgaattttaatattcatttagctataacaaatgaaaaaataacccacgaagatataagatccattcctttatatgaggaatcttacattttattagcacccaaggaaacatttaaaaatcaaaattgggtagatgttgaaaatttgccactcatattaccaaacaaaaattctcaagtgcgcaaacacttagatgactattttaatagaagaaatattcgtccaaatgtcgttgtagaaacagatcgattcgaatcagcagttggatttgttcatctcggcttaggttacgctatcattccgagattttattaccaatcatttcacacgtctaatttagaatataaaaaaattcgtccaaacttaggccgaaaaatttatatcaattaccataaaaaacgcaaacactccgaacaagtacatacattcgtacaacaatgccaagattatttatatggacttttagaggctctttaacttaagttattagagcctcttatacagttgttcagtcagctgtataccttttgcctttaacttaagttattagaacctcttatgcagttgctcagtcaactgtataccttttgcctttaacttaagttattagagcctcttatgcagttgctcagtcaactgtataccttttgcctttaacttaagttattagtgcctcttatgcagttgcgtagtcaactgtataccttttgcctttaacttaagttattagagcctcttatgcagttgcgtagtcaactgtataccttttgcctttaacttaagttattagagcctcttatgcagttgcgtagtcaactgtataccttttgcctttaacttaagtaattagagcctcttatgcagttgcgcagtcaactgtataccttttgcctttaacttaagtaattagagcctcttatgcagttgcgcagtcaactgtataccttttgcctttaacttaagtaattagagcctcttatgcagttgcgcagatcatcgtataaaaattaatgacgtcatttcaaaaatcgatacaaaaataatttattataaaaattctaagaaagaagtgaagcagatgttaaaatctattaatcatatatgcttttcagtcagaaatttaaacgattcaatacatttttatagagatattttacttgggaaattgctgttgactggtaaaaaaactgcttattttgagcttgcaggcctatggattgctttaaatgaagaaaaagatataccacgtaatgaaattcacttttcatatacacatatagctttcactatagatgacagcgaatttaaatattggcatcagagattaaaagataataacgtgaatattttagaaggaagagttagagatattagagatagacaatcaatttactttaccgaccctgatggtcataagctagaattacatactggcacacttgaggacagattaaattattataaagaggctaaaccacatatgacattttacaaataaggcgtcattataaaaaggcctcttgaactccgttaaaattttaattaatgattatataataagagaacttttcaaacaatacagttgttatttttgctatttcaacaaacataaataagcagtaagatgactacaacttaagagtcatcttactgcaattatttttcaaatatatcaacgttaatataacttctattaagaaatactcacattctgccctgcaatgcaaatctcgtcacatataaatatttttaattattttaaaaaatgatgcactaaattagcaacgagcttagcagttctattgtcagcgtcatatgttggattcatctcagcaatactaactgaagacaccttatcacttggaataatacgttttgctaattcaagaacagtatgtggatacaaacctaacactgccggcgcacttaccccaggcgcaaacgcactatcaatgacatccatacaaatcgtaaacataatgacatcatgttcatgtacaaaacgttcaatcatatctttaattgttggtgatacgtgactcaataattcatctgcaaagacataatcaatctttttctctttagcataatcaaataaactttgcgtattaccaccttgagcaataccaagcactaaataatctgtgttttcatcttcttctaaaatttgtctaaagctcgttccagatgtagattgttgttcagcacgtgtatcaaaatgcgcatcaatatttatcacaccaatagattgtgttggatagactttacgtgttgctaaatattgagcatacgcaatatcatgtccaccacctaataaaaatgtttgtctatgattagcaattgacttcgctgcaagcatagcaaattctttttgagtatcaattaattcctcatgatcatgataaacatttccgtaatcgactaaaatttcacattgattcaaatccggcaaacctgcaaatgcttgtttaatcgcatctggtccttcttttgcaccaatgcgccccttgtttaaagcaacacctttgtcaacagcatagcctaatataccgacccctgatggcatactactcttttccagcttagacaaatcttcaaatgttactgtttgaaaatgtctaaattttttcgggtctgtttcactatctaaccttccattccataaatttggttcaccttgcttgtacacagcgtttccccctcttatttatgtggcttattaacaattaaagtataacgtataggaaattttgaattcaattcatagttaaatccgtatcttaaaaatacttatctacattacttttacccctattttctatgtaataacgaatacttagctgatttatgttaataaaatacgtcaagactattacattttcattaatattgacatagacaatttatctctcggcttgtaatatgtataattgttactaaaagatattttgcttgttacctaatggaggttacatataatgaagaacaataaaatttctggttttcaatgggcaatgacgattttcgtcttctttgtcattacaatggcgttatccattatgctcagagatttccagtctataattggtgtcaaacactttatatttgaagttacagatctagcaccattaattgctgcaatcatttgtatactcgttttcaaatataaaaaggtccaacttgcaggtttaaaattctcaatcagcctgaaagtaattgaacgtctattgctagctttaattttacctttagttattctaattattggtatgtacagctttaatacatttgcagatagctttattttattacaatcaacaggcttatcagtacctattacacacattctgattggacatattctgatggcgttcgtagtagaattcggattccgttcatacttacaaaatattgttgaaacgaaaatgaacacgttctttgcaagtattgttgttggtttgatgtattcagttttctcagcaaatacaacttatggtacagaatttgctgcttataacttcctttatacattctcattctctatgattcttggtgaattaattagagcgactaaaggacgtacaatttatattgcaacgacattccatgcttcaatgacattcggacttattttcttgtttagcgaagaaatcggcgatctattttcaatcaaagtcatcgccatttcaacagcaatcgttgcagtaggatacattggtttaagcttaattatccgaggtattgcatatttaacaacaagacgaaaccttgaagaacttgagcctaataattatttagaccatgtcaatgacgatgaagaaactaatcatactgaggctgaaaaatcttcttcaaatattaaagatgctgaaaaaacaggtgtagctactgcatcaacggtcggtgttgctaaaaatgatactgaaaatacagtggctgacgaaccaagcattcatgaaggtactgaaaaaacagaacctcaacatcacataggtaatcaaactgaatctaatcatgatgaagatcatgacatcacttcggagtcagtagaatcagcagaatcagttaaacaagcaccacaaagtgacgatttaacaaacgattcaaatgaagatgaaatagagcaatcattaaaagaacctgcgacttataaagaagacagacgttcatcagttgtaattgatgcagaaaaacatatcgaaaaaactgaagaacaatcttcagataaaaacaaataataacaaagcgcttgctagtacctcttaaaaagatgatgctagcaagcgcttttctatactatatattatttttctaaaattttaacaccctcttgagtgcctacaataacttgatctgccatatctaagaagtatcctgtctcaaacacacctgtcagatgaattaaatactcatggaacttatatgggtcaattccttttggtaacttacaatctaaaatataattgccattatcagttataaatgcgacatcttcgtttacacgacgttctacttttatatcagcgtatgattcaattttacgtaatatgtgataccagttaaatttatccacctctactggtaacttaaacgtctcacctaagtattgaaccattttcgtttcatcgacaaccacaacaaaacgcgatgccatttcatctataactttctctctgaacagcgcaccaccgccacctttaattatatttaaagatggatctacttcatcagcaccatcaattgctaagtcgatatgagcaacatcattgatttcacatattttaatacctaattcttttgctaaaaatgcaattttattagaagtgcatacacctgtaatattgtaaccacgttctttaattagttgcgccatttgaggtaagagtaattccattgtacttcctgtaccaattcccagcgtcatgtcaccattgatttgacttaaaacatcatttaatgtcattaacttgagtgctttgacatctttcatgaaggtagcctcccatatttatgtaatctattcaattcatattttacatgacttgtataaatttacatacccttatttctaacatttttttaaacatatcaatcagaatttacaattctaaaaatgttttatagtacaatatattttaaataatactcgttaaggagaatgatatgatatcaattcacgcaatttcgacaggaaaaatccaagatttgccttatagctcgaaaagaccgatgcgctctgctttagataaaactaagatttcacaaacaacatggttatcttcaactggtttcactggtgatgaacaggcttataaagatcatggtggaccacataaagcagtttgtgggtttagtaagcataattatgcactgtatcaagatgatttacctacactacctactcatgcgatgtttggagagaatttaacatttgattatttagacgaatctgatgtttactttggtaatcaatatcgtttaggtgaagcgttaattgaggtttctgaaattagagaaccatgctggaaaattcaagcaaaatataatattcctgatttagtgaagcgcatgtctacatctggtaaaacaggtttctatttccgggtattaaaacaaggctatgtatctccaaatgatcagctttacttaatacaagaagcaccaatcgaacatcgtttatctgtacaacagcttaatgacctttattataatgatagacaaaatcaagatatgttacgatatgcactaaacaatccatttctgtcaccaacaagacgcgataaacttcaaaaaatgtataacagaacattgaaataattacctttcattataagtgttaaatgaacttttcaaaacaaaaaggaatcaacttacacatcgtttgtataatagtcttatctataaccactgatgctattgattccttttttatgttatatattttctttatttcaaactgtatattaatgatgtcacttcatttgatacgattcttgataacctattcaaaattccgccaaataacataaatattatataaatgccgatacttttaatcattttctactttttcttcgatacggaaacttgttttcgaattgaacacttcaccagcttttaaaattgacggtgctttttcaccatataaattaatatcatttggtaaaaattgtgtttctaatgtaaagccagaatgtggtttataaatattaaatggactatcccactcatcaggctggttaaaagtaaagaacacaacatgaggcatatctgtatcgacctctaacataaattcatgattttcaacatacattttatgttcaccaactgtaaatgggtgatcaagaccaccaaaacgtgtcatttgttggcttaattgcgcatgttgtgatgtaaaaatatcactcaattttatcttgttatcttcaaacacttcatgtaaatctagaatatcacctgtaacaatatttcgctcatctaatacatacatatctaattgattacttgaaatgcgatgattatcaacgacattattatctcgattcaaattgaagtacacatgattcgtaggactaaacaatgtgtcttctgatgcaactgcttcgtattcaatcgaccattggtgatccgcatcataaatatgtgtaatcgtcacatcgatatcacccgggaaatgatcatcagctgatttcaacaccgtcttaaatataactttaatttgagcaatttcatttctaatttcataatcaaataacttattgtccaaaccatgacatccaccatgtaaatgatgttcaccgttgtttttttctaactgatattctttacctttcaacttaaatttagcattatcaattctaccgctatatcttcctatagaagcaccaaatttaaaaggattactatgataaaattcatccgcttcaacaacatttccaagaacaatattattatcatgatatttccaagacactactcttgctccataattcgtaaaaataattttagtttcatcattatcaattttgattaaatctacaccttgtctttggtgctcaacttcaactatcatttttacttctcccttctaaccacaagtgttcaagctctgctgggtagcaacattactaaaacacctacaatacaaatgattgcaccgataacatcatatttatctggcatttgtttatctacgaccatcgcaaaaatcaaactcatgatgataaatacgccaccatatgctgcatatactcttccgaatgatggaaatgattgaaatgtcgcaatgacaccatataacatgagtatcgcaccgcctattagcccaacaagtgaagactgtccttccctaagccacagccaaatcaggtatcccccacctatttcacataagccagctaatataaatataaaaatcggatataacatgaaatcactccatcacatatttgctaccaataatctatcggctacatatcatttgtttacatttcttcttacttcacattcccattttaaaaagttcgttttcacattcatattgtacacttttttagacattattctatagctaaatataaaaaaataagagtaacacgctttcatcatcattttatatgataaatgtgtgtcactctcatcaattttattttttaaatacacgtttcattgaattaaataagccacgttcaaatgtaagtactgaatctttatatgttttaattgcaatccatatcaagacagctaccattacaattgagattaaagaacttaagatgacctcatatatttgaagccctgaagtttgagcgcgtacaactaattgaaatggcgctaaaaacggaatataacttgtgattaaagcaagttgtccatcaggattatttatcgtgaatatcgcgatataaaatgcaatcataccaagtaatgtcagtggcatcaaagattgatttaaatcttctattctagatgttaatgatccgaggatggctgcaagtaatacatacgccataattccaacaatactacttataattccgacaataataatttgccaagacaattgattcatttccacgttaaaaccttgtagcaagtcttttaagtcaaaggcaaaaacgcatataaatgccatcaatacaattaaaataatctgagtcacggcaactgctataacgcctaaaattttagcaaaaatatgttggattggtgaaatacttgtaataatcatttcaatgacacgcgatgttttctcactagcaatttccatagctatttgagatgcataatttaaaacaataaagaacattagaaagataatgccataagctaaagcatagttgaaaatcttttgtccttctgatactttatcgacttcatcattagaaatcaccttattatcaactttactttgtgcttgtaatttttgtaagtcttctttgttgatatttaattctccggctaccatatttgtttgaatagctgtaagcagtgcttgtactttttgtgaatcttcatgacttactcgcttctcactaatgattgtcccttgtaacgtgcgattttgattcaccttgataatataagctttatcaagtttatgtttttttacttctttttcagcatcttctatagaaactttagtaaacttagcatcactatgaaatgtattcgcctgttgcttgaaaaccttatagatttgttcattcggtgctgctacaccaattttatctggaccatcatcaaacatgttaataatcttatcaatgtttgataggccaatcattaaggcagcaataataatcataaaaattacaaatgatttagctttaatttttttgatatatgtcaaagtaaatgtcgcccaaaacttatgcatccttgccaccaaccttctcaatgaatatatcttgtaatgatggttctacaacttggaatcgtttaacataaccttgatgtgccacaacttgataaatatctttggctacgccttcattctcaatcgtcaactgaagaccttgcttcatgttttcactatgaatgatacctctaatgtgtgttaaatctggtagtgttgtttctgactcaatgacaactttcttgttaccattagatgcacgtacatgattgatatcaccagaaacaacaagttgacctttatctaaaatacaaacatcatcacataattcttcaacatgctccatacggtgagaactataaacgattgtactgccccaatcatttaagtctttaacagcttcttttaataactcaacattaactgggtctagaccactgaaaggctcatctaatattagtaattctggtttatgtaacatacttgctaacagctgaattttttgttgattcccttttgatagactatcaattcgttttttgcggttttcagtaatatcaaaacgctcaagccaatacgatatttgctgttgtatttctgtttttgacattccctttaaagttgccaaatatttcaattcttcttcaactgtcaatttcccatgtaaaccgcgttcttccggtaaataaccaatacgattgtacattgttttatctagttttttaccgttatacgtaatgtgtccttcagttggttcacttaagcctaaaatcatacgaaatgtcgttgttttacctgcaccatttctgcctagaaaacctaacattttgcctgattctaactctaatgaaatatcatttactgccgtcatcttgccaaaacgtttcgtaacatgttcaattacaagtcccatactttgcctcctaaaaaaatatgtatttatcttaatataacatttctattctctataaatgcaatatttttaaagtgaatttatttttaaaatttctgaaattgaaatatttaaatagtatcttctttgcatgttaagtatcattagcgctagatacgcatttcccatacctttattgccttattggtaaaaaaatatcccagcatcattgtgccgagatatttatatcattacaattgattatctgtttcttccggtgttttcggtgtttcagatgtcactggttgatttttaattgtagacgggtattttgggctttcgccatatttatttgccggcttactgtcaaagcataggaatactatcataacaattgttaggcctaaataaacaaaataaagaagtactaacaaaatattaagacccatcggcattaatgtaaaatcactgtcataataactatcgataatctgtaatactatataaaatataatactgaatactgtcataatcattggaaataacattgttcttgatatatcgtgaaatcttcgaacgcacaacgctaaatttggaataaacgttgccaaactatagacaaaagtatacacagatgtaaggataatcatcaatatactcataactattaatgtttcgttatctgccgctatagaaataaagaatagaaataggtttattattagcacacacacagctggaaccataagtatcaaatgccatagtgccatataccaatattcactacgtcttgatctccccttaaaatttacataatttttccaaaataatacgaatgatttcataaaacctacttgaggtaattgttccattgtaatctccctttcgttaatcatatttatatttttaattattgttaccgttataatttacaagattcattatcaagccacttcatttcaatcgtcattcactttggaaaatggactttatatttcatcactagtaaaatgaaaacccgctacaagtacacatctatatggagactcatttgaaagtcaacgcttcgttaactatactaaaaatatgtcacactgcaatgttcacgtttaaaagagtctcaatctctgcaaataaaatattccataacaaagtatatactttacatttttataattcttaacaatactattttatcaaacatttaccacaataaaaatatctttttcatttttatttaatttaatcatataattgtgaggagaatattatggatttcgttaataatgatacaagacaaattgctaaaaacttattaggtgtcaaagtgatttatcaggataccactcaaacgtatacaggctacatcgtggaaacggaagcatacttaggtttgaatgatcgtgcggctcatggctatggcggtaaaataacacctaaagttacgtcattatataaacgtggtggtacaatttatgcacatgtcatgcatacgcatttactcattaattttgtaacaagatctgaaggtatacctgaaggcgtacttatccgcgcaattgaaccagaagaaggtttatccgctatgttccgtaacagaggtaagaaaggctacgaggtaacgaatggcccaggaaaatggactaaggcatttaacattccacgggctatcgatggcgctacgttaaatgactgtagattgtctattgatactaagaatcgtaaatatcctaaagatattattgctagtccacgaatcggtattccaaataaaggtgattggacacataaatctttacgttacacagtgaaaggtaatccatttgtgtctcgcatgcgtaaatcagattgtatgtttcccgaagatacttggaaataaatgccatctttcattgattactatcatgaaaatgaaatctatctccttataagtcaatcaatcgtgccgtcaacatgcggatgggttgattgtttttctttgtatccatcatattttttgattcatctcctcttattgaacttgttcttaattataaaatataacaatagaattatttataattattaaatttagatgcattaatattattgatattattttcaaaaactagaaatattgatttgttgcatgtataatgttaaaagtgcccttttataacgcttacatataaaagcttatttagggagagggatattcaacaagggggatttgaaaatgatagaacttaatgcaattacaacattatgtttagcttgtatcctttatttacttggtaaggctatcgttaatcacgttaattttttaaaacgtatttgtataccagcaccagtgattggcggcttaatctttgctattttagttgcggctttggattcatttggcatggttaagattaaattagatgcttcattcattcaagatttcttcatgttagcattctttacgacaatcggtcttggtgcatcattgaaattatttaaattaggtggcaaagtcttgctattatactttatgttttgtgctatcatttcagtcattcaaaacatagttggtgtatcactagcaaaagtattaaatattaaacctttgttaggattaacagcaggttccatgtctatggaaggcggtcatggtaatgctgctgcttatggtaagacaattcaagatttaggtattgattcggcactgacagcggctcttgcagctgcaactttaggtcttgtatttggagggcttatcggtggtccagttgtaaaatttttaatcaaacgttataacttaaagcctcaacatagtgacgatacatttaaagattatagccaagtagcatataacgaacatttacatagtaaatttaatgccactgaagtattcttcattcaatttacaatcgttgtattctgtatggcagttggaagttatttcagtcatttgtttacagctcaaacagggattaatgttccaatttacgttggctcattatttgtagctgttattgtccgaaatatctctgaaagttttaattttaatattgtagatttaaaaattactaatcaaattggcgatgtcgcattaggtattttcttatctcttgcgctaatgagcattcaattaatcgaaatttataaacttgctatacctcttattattatcgttttagttcaagttgtcgttatgattttatttgctgttttaattttatttagaggtttaggaaaagattatgatgctgcagtaatggtaggtggttttatcggtcatgggcttggtgcaacgccaaatgccatggcaaatttagatgttattactaaaaaatatggaaactcacctaaagcatatttagttgtacctattgttggtgcattcttaatcgatttaattggtgttatagtcattatgggattcatacaatggtttagttaaacaccaaactcataaataaaagaggaggccttcgcctcctcttttatttatcctcgatgtatattcaagttacgttgttctatccatgacaatatttccggactaaatacgatttgtttttgtgttaagtcgtcaatatttttagcatctaacatcgtcattattgatttcatgtgttcaataaatgattctacataagctactgtatgtgcaatgccattattttcaacttgatttaaaaacggacgtgacataccagttgcctttgcaccaagtgctaaacttttaattgcatcgagtggtgtacgtaaaccaccactcgcgaaaactgaaatttcgctttgataagccgttgtttcaagtaatgactcaactgtagactgtccccatgatgataagtaatccatatctttatttgcacgacgttcattttcaatatctacaaagttagtaccacctttgccactaacatcgacatacttgacgcctatttgttgtaagtcatgcattaattctttgctcataccaaatccaacttcttttataatgactggaacagacactcgtgatacaatcgacgctatattatctaaccaagtcacaaattcacgattcccttcaggcataactaattcttgaggagaattaacatggatttgtaacgcttgtgcctcaagtaattcaactgcttccaaagccttttctactggtacgtccgcaccaacattgctaaaaatcatgccttcaggattcatttttcgcgcaatcgtaaacgtctcagccatgcgtggatttctcaatgccgcatgtgttgatccaactgccatcgctaagccagtttctcttgcaactacagctagcttttcattgatgtttttcgtccactcgctaccacccgtcattgcattaatataaaccggatatgccatcgttaagtcaggcgtctgtgatgtcaaatcgatatcatttacattaattgatgggatagaatgatgcacaaaacgcatcttatcaaaatctgaatgcattgcgtcagattgagccattgctatttcaacatgttcattttttctctgttctctttgaaaatcactcatgattaaacctaccttttcgtcatttctaatttaaaaccattttttacgtctgaaaaagatgattaatacgacagctataacaaacattacagctaagcaaatataatatccataatgtaaatgtaatgccggcatatttacaaagttcataccataaatcccagctatgaatgttaacggtgaaaatataactgatactaacgttaatacttgcataatactattcattctaaatgacgtgtatgactcaaaattttctcgtatttcgtttgtcatttcttgagcagtacgaatgatattacgttgcttaatcaagtggtcatcgatatgttgaatgtatagcgaatgtttattatctataatcaaatcaccattttgtttcattgtatcaattagctcttgcataggaaacagtacacgttttactttaatcaaatccgaacgtaacttaaagacactatccatgaccattttattaaagcgatcatctacatggcggtcctcaaaatgataaacactatcttcaagtgcatatacaaagttgaaatatttatcaaccatcatatctaaaattaatatgacgacatctgcacaatctaattctgcatctaatgtattcatatacttatagactactttatttaatgattccaacgtttgatgatgatatgttactaatacattgtcttgtataaaaatatttagtgctattggtgaatagtttgaccccataatactatggaatactaagtattgataatctttataagatttatatttagctcgtggcataccgttaattgcatcatccacttctaaatcattaaaattaaaatgtgctttaaaccattcattttcttgttcattcggttcatcaaaatcataccaaacaatagtcgcatcttttggtatctctttgatatcatcaactactttaaacggttcatatgtagtttgataccgtatctttaaagccatcgatactccccctaaataacgaattctctattattttatcatgaattaaataacgtgtatgtcttaatttattttagtatgatagtcactaaggagatggttattatcaaacaactttttacacatactcaaaccgtaacatctgaattcattgaccataacaatcatatgcatgatgcaaattataatatcatttttagtgacgtcgtgaatcgttttaattacagccacggtctttctttaaaagaacgcgaaaatttagcatatacgctatttacactagaagaacatacgacatacctctcagaattgtctcttggcgatgtatttactgttactttatatatttatgattacgattataagcggttgcatttatttttaacattaactaaagaagatggtacactagcatcaacaaatgaagtaatgatgatgggaattaatcagcacacacgtcgttctgatgcttttcctgaatcattttcaacacaaatagcacactattataaaaatcaaccaactatcacttggcctgaacaattaggacataaaatagcaattccacacaaaggagcattaaaatgacagatgcattacaacaaaagattcatatcgaattactagatttattagatgatgttaagtttgaattaacagaattaaatgcacaaaaagggttatacattaacggaccagcaaatcagttacttaagcgtggcgtgcatatggcttatgttcaaggacaaaagcaagctatcgataatattatgactattgtggaacaacagcttgaagatcaacatttcctagaacattatgataaatttcaaaatgaggttgctcatcgcaattatgataaaacagctaactttgcagaacttagtgatattccacgtcaattcgataattttttagatcaattttatcaaattaaagggcaatactttatcatcacacatatcaatacacttattggtgattttcactcagaagctcattaacaattagtctatataacccttgctatattttcaaaaacaaaacccaattacgttttcatgtcaaatatcatcttgcatgaaatcgtaactgggtcatttatatgttattagttattttgtgttacatcctcatctatcgatttggcaatttgtttaatagctttatgtgattgtctaattggataaattggaaaatcatgtaccatcttaggataatcataaaactcaatgtattgatgatgttgcaacatcatttgttcgaatagcttcatatcaggatgtgtcatttcacgtccaccaccaaacatataaactggtggcaatccttctattgtgccattaattggcgatatgcgcttatctgttaatggtaggccattcgcccattttttcataatctcattgacaccaaactgacttagaaccgcatcttgttcgattaaggcgtccgaaatatctttattagatagtgttgcatctaaaattggcgagattaaatacaatttattcggtaatggctgttgattatctaaaagagattgtacaaaggataatgccagtgcaccacctgaaccatcacccatgactacgacattttgatgtcctacttcagatactaattgatcataaacacgttgtatcgcttggaaagtatcgtcaatatgaaactctggtgtctttggatagataggcagtacaacctcatataatgtacttaaagtgattttatccaacaatctccaatggaacggtgatggttgtagtgcattgaatccaccgtgaatatataaaattttcttatcaatttgatgtctgaaattaaagcgaaagacttgcatatcatctaatgacaatttttctaaatttgctttaacatttaatgttgaaggctgcttatgtttttttctattttcaatttctcttttataaaaaaatctttcaacatcttgatcatttttaaacataatcgagcgattgtgaagcaaatatttattgacaacgctattcataacacggtttctaatcaatgtcttaacctacctttatatattttatgtatccaatgattgtctatcccctacattctttgccaaaaaaagtatataatgtagaagatattttctttttcactttcaaatttaagactacaattgaacagtgatttttcatcattataacagacaactagacatattgataagtaaagaaaagaactttatacggaggtaccttgcatgacaaatccaaatcaacgattagaaccatttgatgagacatttcaacaaccgaatattcatcgtggtaagcgatatggtaagaaaaaacgttcattggtaagcatgattattcaaatcattgttgttatattaaccgcaatcgctggatacagcatgtggaaacaacccatttttaatattgtcttcaccaaagaatctgtagattttgatggcattaaaaattttaacgagacaattggaaaaatgcatcaattaaatattaatttgggtaatatcaatgatttacaacaaggaatcgatcgcttaattttagtctttaacggtttctttattttatgtatcgttagcctagtcataacaatactgacaattgtatttaatcgcacagttctaaaagtagtaaatattttagtgttaacaattatgttagtcattacattgtatttcagttatattattaaagcactcgcacaagaaattgcagatgttttcaaaaaatattatttaaatgtaccaccagatcaagtgattacagaagctgacgctattcataacggcatcattttactgggctgtagcatcggtttacttgttataagcttattcttccgtaatcgcatgcctcgtttaaaataatgttatatagtagggattgggacagaaatgttattttcacaaaattcatttcgttgacccacttcctgctttttctttattaatgacctactacgtcaatgccaaattttaatataattcctctaacattctacaaatcaacaaataaaaaaagtatcgataaccatatattggcaccgatactttaaaaatcatgtccccacaacataatttttgattagtcacacttcaattaatttattttatttattcatgattgttatttgagcttgcttctaacttttgagctgtagcttttgcttttttattactttgtaaaaataaacataaaattaaggctatgatgctaaatatcgttgcaactataaatgcatcattaataccttcaaccgttgctagtttatttacaaattgtagtaacactttcattgcgccttcttgtccgccgtattgtgatgctaattcacgcatatgatcttgtacaacaggattcgttttatctaactcttccccaaaagctgataagtgttgtgtagtttgtgttgtcattacagtaaccaagattgctgtacctatagagcctgctaattgacgcatcgtatttaagaaagcattaccatgagaggcaagtcgtcccggtaacgcattaatagctgcagttaccattggcatcattataaatgccataccaaatgaacgaagtacatagatacccatgattgtcatatatggtgtatccatatttaatttagttaattcccatgttgcataagtcatgacagcaataccaaagatagctaatggttttaaaccaatagtatctaacaatttacctgcaaatggtccaagtagacccataattagagaaccaggtaataataacaatccggaatctaatgctgagaatccgcgtaaattttgtaaataaatcggtaataaaatcataccaccatataaacttaacattacaaccatattaataattgttgttaatgtaaatgttgggaattttaatacttctaaattcaacattggtgatttcattcttaattctcttattacaaatagaataataaagataataccaatcgcaaacattgtttctatctcaacagaaccccatcctttgttccccgcttctgaaaagccgtataacaaagcaccaaaaccaatcgtactaaaaatgatacctgggatatcagctttagggtttgttgtatattgatataacttaaaccatacaaaaccaattaaaatagcgataatcccgataatgaacataccgtaaaacatcacattccaatggtaattttgtacaatataacctgataatgttggaccaattgcaggtgctaaaatcattgcgatacccattgtacccatggcagcaccacgtttttcaggtggataaattgtaataataacaattgaacctaatggcattagtacacctgcaccaatggcttgtaatacacgtccaaccatcatgattgggaaattcattgaaatcgcacagattaatgaaccaattgtaaagagtactaacgcaactaaaaataattttcgatatgaatatttattaaatagatacgccgtaattggtattaaaataccgtttactaacatgaatcccgtcatcaaccattgccctgttgacgcagaaatattaaattccgtattaatttttggcaaagcaacatttaataatgtttggtttaaaatcgcaataaacataccgaataataatgccgctaatattttaccgcgtgaaacaccttcaccaaaaataaagtttttatgttcttttttattttttcattcactttatattcttctgattcaggatttttagcagcaactgcttcctcaccattattattagtgaatgcttcttgatctttctcagacccctttgtgtaaccatttagactaacttggctatgatcatcttgattgtcaacacgcaactcttcatgcgtcatacgttgtgtcgattgatcagttgttttgtctaaatcactagctttaaatttagattgatttgattgacgtgtcgtaaattgttgttccttttgttggcgtttgcctttttttcttgatcttattaaaaataaattgataaccccaacaataatgagcgctaaaataatgtagctaataatgaaggtcgtagtcatttaatgacccccttaatttttatgaatttttacttcagcgttcattccaggaacaacttgtttagacggttctgattctagagtaattttaacaggtattacttgagaaactttagtgtagttaccatcactatttgatgatggcattaatgaaaagcttgcagcagttgcttttccaatactatcaactttacctttaatagaagctttttgaccgtcaatagtcacatcaacatctttacctacttcaacatctttaatatctttttcgtcaatatttgctgttacatataaatcatctaaattgtatgcataagcgattgggttaccagcttgcaccattgaaccttccataccatctaatttggcaattgtacctttttgaggcattttaagatccatatctttcgtttcgccatcttgaccttgtacagtaacagttgctactttgtcacctttatcgagtttgtcaccttgtttaacattaagtgatttaatttgtccagatgcaggacttgctattttaatttgatcgccatttacttttgcattatcagttgttacatagcttgttgttttattccagaaataaaagccagcaatcccaattgctaacagtacaacaaccgtaatgacattaattaatatcatctttttcatgaaacatttcctcctatttgcttttaaaattcactttatttattatagagacatgataactaaaaaaacaccaacaatttttataagagtgttggttaaaattcacaaaggtgtaacaatatgaaacgacaagccaaaatagaaattcaaaacgcacttgttgatttgatggctgaatatccttttcaagaaatatccactaaaatgatttgcgcgtattgtaatattaatcgttctactttttatgattattacaaagataaatttgatttattggataccatcaactcaaagcataaagaaaaattccaatttcttctaagcgcgctacatcataatttcgaaaatattaaacaggataagcttaaactttataaattcttcattattattgctaagtatatcaagcacaatgagcagtttttcaaagacattttagttacctatccaatgaaaacattattcatagactatataaatttagcgagagattactatcaacaaattatgaatgactatagtactacagtaaccaataaacagctttatgttacatatatcataggcggtcaagctggggtgtttattaattggctttcgaatggttgtaatgaatcacctgaagaagttgctgacattttattggctaatacgattaaacttcaaaactaataatacggtttcattctaataaagaaatgctataaaacaactagataaagttaaaccaaatggatagataatagtacatatgttacggtgctatcaatataaaaatgccgagatttccacataataatctcggcatttttatttttgatgctaaattcataggtctatgaatagctcaagttttgttttttaatttttcaattcaatataatagaagaaactatgtttatcatcgatttgttttaaataccctcatattataaatctgtaaaataattaatataactgctgtagctataataataattatgtaaggtataggattatcttcaccttttacccctactaatggcgatgcaacaccaccaaataaaaactgcactaaacctaataaacttgatgaactccctctaccactactactttcatccatagctattgtaaaaccaagtgtcgcaacacctgtcactggtgctattaaaatgataaatcctatcgctaaaatccaaaagttccaatgattaagcaatacaatcgtcactaaaattacaccgataatctgaatcatcgtcatgcctctcatcaatttttgtgagtctataaaatcaacaaggtacccagtaagttgacttgatataatgagcgtaataccaattcctgcgaacatccaactaaattgtattgcagtcatgccataaattttttgaataataaacggagacgcagaaatataagtaaataataatacaaatgtcataccttgaatgagcattggtaatacaaaacgtggcgtcttcaataatattttgaagtttttaaacattgtctttaatccactacttgactcacgatttgtcactgttaatgattcaggtacttttaataaagaacctatgaccatgacgaaaccaaagatagtcagaatgacaaagaccatacgccagacagaataatttaaaattatgccccctattgttggcgcaacaactggtgcaataccattaacaagcatcaataatgccataaacttagttagttcattaccactatacatatcacttgctatagctcttgaaataactgctgctgcgccacctgtcactccttgaagaaatcttaatgcaaccatcagccaaatattatgtacaaaaacaatacctaaacttgctaatgtaaaaataatcatagctataataagcggctttctgcgtccagttgaatctgaaattggaccagcaaacaaattaccaaacgctaaaccaatcataaacatcgataatgttaattgtgcgttagacgtcgttgtttgaaaatcatgtctaatatctggtaatccaggcaaaaacatatctattgataatgctccaatggcagtcaaagatcctaaaataataataaatatcggtgaacgcttgttaaaatacgttaaatcattcatatgactatctcctttgtataatgattagtttataactatcacgaacagaaactaaatttaaatatgctcttttatatattagcattagtcacaagtttcatgaacatcattacaacttataaaaggtataaaatgatataaacctcagcactccataaatttttccacaaaaaacaatcccttcaaagtaattcacactaattgtaaatactttgaaaggatgttgtttgtattccatgacacatgcatcttatttaagttttatactctatttttctgatgtcttgattaattgcaagcggtcttgcgagccttgttcaagctcatattctttatctacttgcttaccgttttcatttattaatcttacggttgcggtaatcttatcaccatgtttttcggcatctataatttgtggtgaactaatcatcattaaacttcctttagatacacgcttctttacatcatcataaaaagatgatcctttttttatatatgacgatacaaaatcaaaatccgactgattaaacgcagcattattcgctaaagaatatccagcaaagaattctatcaatttgttcttcaagctgttttcttctttttctttcttttcaacatagtcttcgatatcttcactgtcaaaattcaaagttatctctgtattgtattttaaatcgctagctttaatcgtcttcgtctgtgttgtaaatgttttatctttcgctttacctgaagctgaaatggtaatatctttattttgtggatatggaccatacgttttggaacttgaaaatgccatttcatggtcatttatagttacttttttagaactatcatttaattttgtatcgccttttaaagttacagatatatttgcttcttcaaaatcttcagtaacatctaccgtttcagaattactttgtctaaaatcaaattttaaatggcctgcaaaatcaccgttctcagtcgatttcatagctggaattctatatgtcccaggtataaaattacctattggcgtcactttatttgcttcagctataaccatctttttcttaccaccagatttaaactcatattttgttttttctttcggtttaacaattggttgcttggtaggtgcagtaaagctcatattatcgaaaaagatataacgtgtgccatttttacttacacgtaatatattttgaccagatctggtttgaatataagaagctacgctggtcttactcttattcaatttatgtaccgtatttttaaggtcgctgacaaattgcttaagcccaacttcatctttgatatagttaatgtatactttcgcttcttcagaatctactttattatctttagtacttaataatgttgctactttttgtttatcattattctcaatcgcattcactaatattttagtttgtgcttcaggtgaattgaagtttcttagtaaaaagaacaatataataattaagattaaaatgaaaaaaccaattgcccaaggcaccatttttctcatcttgatgttattagtttgtatatcttcatcggttgactttctatataatgcttgacgactatcaaatttatgtccacattgtgtacatatctgtacatcatcttgtgcttgttgtccgcacttcgggcaagatttcatactttcacctcaattctgttcctcttcaattgttatatgtatatcacaaaaattatttcattattttaccattattattttacaaatattatcccaagaatacaattcaagaaatgattaactttactttagaattgtaccttattacattatttatgaaagtactctctcaattataactaaaaagaaggtgttcaatacatacatatttagtcttatatttgaacaccttcaaaaacctatttatgattgctatatgttttaatgcgatgattgatgacttctaatacttgccttacattttcaatatcttcagaatttaaatcattagtaatatcttgcgcaatatctgtcataatcgcattacgttctttcaaatatgctctacctttgtcagttaaggttatgaatttcaaacgttgatcaatatttaaatttggtttatctaacttaactaatttagcatcgattaactttttaattcgtcggcttactgcggccttatttacaccttgtctttgcgtgatttcactaattgtcaaaggttctttatttaacatacctaatacgttagactgctctaatgaaatttcatattcattttgtaaatctttcaacatttttgcagttaatgcgttaacgttatttataaactgctctaaaaattgaatatggtcttgtaaatgttttaccataattatttctccctaattactatttttataaagtatcctcagcaatcattgtatcgcacatctaaaaaacacaaaaatattgacccatatataatataacaaattaagacttacatgttgctgcgttctccttgctttaataaattaaatcatctacatttatatttaatatttattataagcgaggtgtcagtatgttattgaatttattattaatatttatacttatcgttatttgtccgttaattttcaactatactctgacgttaaatttaacatgctacatcttagttgtcatatcgatatttttgtcactcatctatagcatcatgacctatactttcccttggtctatgtttgtaacatttataataatcagtattatcatgctattcaaacatagatatttattttctcatacttctagtcgcttatttattaaaaaattattatctttttcatataaatttgtactctacacatcagcacttctatttataagtacgattcagtcacctattgtgaaaggtttgtctatgtggttagctatattatgcctttccctgttactaacctttatttgttatctcgtttggacagtatcatatagacatagatcatacaacaaagaagtcgatatcataattgtgttaggtgctggtatttttaccgaatttgtcacaccaatgcttgcagcgcgtttagaccgtgcacttgatatctatcaacaacaagcatcagcaacaaagattattgtatctggcggacaaggaccagacgaaccaatttctgaagctttagctatgcaacgttatttgattgcacatggtgttgataaaacagatatactaatggaatctcactctataaatacatacacaaactttttatattctaaacaaatcatcaacaatttgtatcatgaagcagttaaaattgtttgtgtaacaagtcagtttcatgtattgcgcgccttacgactagcccaaaaattaggtttatctatcgatggtgtcggaagtcatacaccatatcactttttcttacatgtgctcattaaagattatctaggcgtaatgtatcagtatagattgttattaacgttatattgttcaagtagttggtttatatgtctttacgccgcttttatttataatagttaatccacaaacaaactattattataggttgtttctaatattgcgtcaaactatctttaaatattcgttaatccttgattagacaattgttatattgaaaataaataaactaaagcacgtcatcattttatataatagtgacgcgcttttttgtaaacccaaatcgtattctgttatctaacttttatactactatgtcttaaatcattaacatttagcgtctttacaagccactaatcagttattttgccatcttctaattcaatcactcgatctgcatattcaaataatcttcgatcgtgtgtaatcataataccaatcatttgttgttctttaatttgttgacgtatcatctcaacaacttttgttgctctatcggcatctaaacttgctgtgggctcatctgctaaaatgattttcggattattcataaatgctctcataatcgcaacacgttgcttttcaccgccagataactgatgcggatatacattcaagcgatcttctaaaccaatattttttaaaagttgtattgctcttgttgaactttgttgtttggtcattcccgcttcttgacctacgagtgtcaattgctctatcacttttaaataaggaactaaatgtgaagattgaaaaataaaaccaatatcttccaatcgtaaatcactaggacgatgctgtttatcaaacaatggcgcatcattgtaaagcactgtaccactcgtttgacttaacaatccgcctaatatcgttagcaatgttgttttcccagaaccagaggcaccatttaaaatgacaaattccccttgttccacttcaaaattaataccttttaaaacttttgtttcagacaaaccttctccgaaatttttgacgatatcttcaacgactaatgccattattctgcacctccaattgcttcgataggatccactttaaataatttgataaatgatagtgaggcacctaaaatcgcaactaatataaatatccccaccattaataagatattttgcgttgttaagtaaaaaggcatcgttaccggcatcataaatgatagtcctactatgatgatcacagcaatacctaccccaattattgttagtgttaaaatttgtaaaactaacgcactcaataaatgtcttgtcttaataccaattgctttcaaaatgccaatttgtgatattttttgaatcgtcataacatagaaaaatgcacttagaacgattgctgtaatagcaaacaaactaacaatcatcatatttaacggtgcttgctctgcttgataactcgcaatattacctgttaaatctttttcactcacaacttgaacgtcatttattttattaagctcatcacgttgttgttgtgttaaatttttcactggataaaatgccgtattaaccttattcaatgcattaaatccgttatcgttcaatagcacaatggaactatgcgcatacattgtgtcgtttaaaataccagaaactctataactagttgaattatttttaaaatgtaatctatccccgactctaatgttgtctgcagctaacttatcattaatagcgacctcatgagcatttttaggataatcaccttttttaagttgtatgcgttgttgtttaacgtcattcattgtaatcacatcttgttctttattagataatttcaatgtttgaatattcattttatatggttcttgatgaattacctttttaatttgattctgttgcgtatcactaagttgcgatttctcaatttgcggctctttcattttttgaacaacatattcatcattatcaaagtgttcaaataacgaaatattctccctaccaagcccttgagctaaaccactaataaataacaccataatacttaataaaagaatgattaatgtgattaaaatataacgaaatttgtaaaacataatctcttttatcgctaatttcatatcgattcacttctccctatttcttctttagcgtcagtataaggttgaaatatgaactcaatatgaacaattgtttttttacgcaaaaatattttacatgtataataaatgaaaaagataagggtgtttatagctatggtgcaatgtcttgttgtcgatgacgatcctcgaatcctaaattatatagctagccatttacaaacagagcacattgatgcatacacacaaccaagtggtgaagctgcattaaaacttttagaaaaacagcgtgtcgatattgcagtggtagatattatgatggatggtatggacggctttcaattatgtaatacattaaaaaatgattatgatataccagttattatgttaacagcgcgggatgcacttagtgacaaagagcgtgcgtttataagcggtactgacgattatgtaaccaaaccctttgaggttaaggaacttatttttagaattcgtgcggtattacgtcgatataatatcaattcaaattcagaaatgactattggcaacttaacgctaaaccaatcctatttggaactccaagtatctaataaaacgatgacgttaccgaacaaggaatttcaattattatttatgcttgcagcacgtcctaagcaaatctttacacgtgaacagataatagaaaaaatttggggctatgattatgaaggagatgaacgaacagttgacgttcatattaagcgactacgccaaagattaaaaaaattaaatgccacacttacaattgaaacagtaagaggacaaggctataaggtggagaatcatgtttaaaacactctatgctagaattgcgatttattccattacggttattttatttagtgcattaataagttttgtattaacaaatgtttactatcattataatttaaaagcatctaatgacgcgaaaatcatgaagacacttaaagaagcaagacaatatgaacaatcagctaaaccaacgcacattcaacaatatttcaaacatttagggcaaatgaattaccaaataatgaccgttgatcaaaaaggtcataagacattttatggggagccatttagagaagatactttatcacaaaatgctattaacaacgtattaaataataaagattaccatggtattaaagataaaccattcgcattattcgtaactggatttttcgacaatgtaacagataatactgttggtattaactttaagacaaaagacggttcaatagcagtattcatgcgtccagatattggagaaacatttagcgagtttagaacattcttagccgtcttgttaatgttgttattatttatctcgatttcattagttatcgcatcaacctattcaatcattcgtccagtaaaaaagttaaagctagcgaccgaacgcttaattgatggtgattttgaaacacctatcaaacaaacacgcaaagatgaaattggaacattacagtatcactttaataagatgagagagtcattgggacaagttgatcaaatgaggcagcattttgtacaaaatgtatctcatgaaatcaaaacaccattaacacatattcatcatttattaagcgagttacaacaaacttctgataatacattaagacaacaatatataaatgatatttataccattacaacgcagctgagcggattaacaactgaattgttgctcttatccgaattagataatcaccaacatttattattcgatgataagattcaagtcgatcaactcattaaagatatcattcgacatgaacaatttgctgctgatgaaaagtcgttaattattttagctgatctagaatcaatcaatttcctaggaaatcaacgtttgttacatcaagcattgagtaatttattaataaatgctattaagtatacagatgttggtggtgccattgacatcgctttgcaacatagtcacaacaacatcatttttacaataagtaatgatggttcaccaattagtccacaagctgaagcacgtttatttgaacgtttttataaagtgagcaaacatgataatagcaatggtttaggtcttgcaattacaaaatccatcattgaattgcatcatggtacaatccaattcacacaaagtaacgagtatgtaaccacctttactattacactgccaaataattcactttaatctctacctcctgaaaaaacatttctgtttttatttcaggaggtatcttttatattgattagcgctttctagccacttaacatttaatttctaccattcaacaaaatttaaatatatcgatggtcatttatggtttaataattttgaaggaggcattaacctatgatgaaactcaatttatttatcaatgcaaaagagacggaatcttatattgatatacatgcacctaaaatgaatgatcacgttcaaagtattattaatgcagtcaatgatttagacaaatcacatacattagtcggatacatagacaaagaaatccatatcattaatgtatcagatgttataacattccaagttattaataaaaatgtaacagccattacaagcaatcaaaaattcaaactaaaattacgactttatgaactagaaaaacagttaccacaacatttcattcgcatttccaaatcagaaatcgtcaacaagtattacattgaaaaattattattagagccaaatggacttatacgtatgtatcttaaagatgcacactacacctattcttctagacgttatttaaaatctataaaggagcgcttatcaatatgaaaaatttgaaaaactcattatttattagcttaatcattggtttgtccctttcactgttctttagtatgttatttgcagacggcaaatattatccactgaacccacaatcaactattggcatattgtattatacgcatttcacagaaactaccgtaatgttgatttctatcattttatggttactcataggcgtcgtctttttccttggagattttatctttaaatacacagattggagcattactaaagcaactataatgcatttcataacaacgtatgtcggattcttgcctttagcaatgcttgccggttggtttccactaacagtgcattatctaatcatattcacaattatcttcattgtggtttatgtattaatttggataattcaattctttaaaaataagaactacgtagacactattaacaagcaactgaaacaattaaaatgattttcattaacaactaaaaaacggtaatgtctatcacattaaaaaagacattaccgtttcatttattatttaacttgtaaatacttagttacttcttcattaattttgtgatataaatcctcatgatctgttaagcgataaccaaatgacggcaccatttctttaatctttggttcccatcctttgaattcatcacgatagcatcgctgtaaaacatcaaacataatatctacagctgttgacgcaccaggtgatgcaccaagtaatgcagctaatgtgccatcatctgacgtaatgacttcagtaccaaattgtaagttacctttagaatcctcagtatccttgattacttggacacgttgccctgctgtaatcacttcccaatcttcatttttagcatttgggaaaaagactcttaaatcatccatacgctcatcattagataacatcaattgtgacactaaatacttcgtaagactcatttctttgatacctgcagataacatcgtcacgatattatttggtttaaccgatttaattaaatccatatgtgaacctgtttttaaaaatttaggtgagaaacctgcaaatggaccaaataacaatgaacgcttgccgtctacaaaacgtgtatctaagtgcggcactgacattggtggcgcacccactgctgcttttccgtacactttagcatgatgacgatcaatcacttcttgatttgtacagcgcaggaataatccacttaccgggaaaccaccaatatgttttgattgtttaatcccagtcttttggagtaatggtaaactcgcaccgccagcaccaataaatacaaaatcagattcatatgttgtcgtttcattagtttctaaatctttaactttaactagccatgccccagatttctgtttcttgatgtctaatacattctgcttatattgaattcccacaccacgttgctctaaattttcaaataactttgcagttaacgcaccaaagttaacatctgtaccagtttcatcataagttaaagcaattggttcatcagacttacgaccttcaatcattaacggtacccaagatttcatttcttcttcatcttgcgataatttcattttttcgaataaaacacttttctttaacgttgcaacacgactttttataaaagctacattatcttcgccaatgacaaaactcatgtgtggcaccgcttgaataaagcgatctgggttatctaattgtcctgttttaactaaatatgcccaaaactgttttgaaatttggtactgctcatttatcttaattgctttactacaatcaactgtgccatccttaccttcttttgtatagttcaactcgcaaagtgctgaatgccctgtaccggcattattccatacatttgaactctcttcgccaggttgtgctaatttttcaaacactttaatatttttctcaggtgataattctttaagtaatgttcctaatgttgcactcataataccgccaccaattaagatgacatctgttttgctatgttgtgttgtcataacaaatacagtccccctttttaaaatgaataatggaacgttcgagaaatacgacatattaataccactttaaatcaataagtgtctcaataggttcccatggtgatgctctattactatctactatgtatattaatattttataataacgaaactactttaattatatactttatgtgcgatagcacaaagacaaaaccacaaaccttaacagctatcaaccaatttaatttgattgctgattactcactattcattttaacataaagcgctaccattattataatgtcaaacttctttcattaatgatccattaaaaaaagatgagatgttagaaaacatctcaccctctgtatatttatattttgaaatacgttttttataataatgacaagatgaaagtccaaatacagatgaatattagtaaacatacactgtatttcaatgtcatttttaataattctgattccttaccaacttgttttactgctgcagttgcaattgcaattgattgtggtgaaatcaattttgccgctacaccaccaactgtattagcagatacaagaagtgaaccacttgttccaatttgttgtgcaacagaagcttgaattggtgcaaataatgaattgttatttacaactgatcctgtcataaacacacctatccaacctaagattggtgatagaactgggaagacattacctgctttagctataccttgacccattgctgcacttaaaccaccataagttgtgattttagaaattgctaagatgaaacaaattgtaagaactggtaaccacaactctttaaatgtaacgccgaataatctaccagcatctttaaagttaacctttttagacattaaaattgtaataataatagttaataaaatagctgtacctgtttgtccaataatatttaaagtcaatactaatggtttatgcgtaacttcgctgattgttccaggtaagttgaatttaaatactaatgatgataaagcaccatttggtaagaataagtttttaaagaatggcgcactccaaatcattacaatgactgttaatacaataaatggactccatgcatgtaatactgcttttgcagaatgtgcttttgcaggttcaatttcttcatctttattaacacgataaatgtgttttggttggaattttttagaaaatactgctaatgctaacattgttaataacggtggaataatatctgccaattcaggtccactgaatacagttaataatccttgagtaagtgtatatgtgattgaaactactaaaattgctggtaatgtttctttaacacctctaaaaccatcaataataaagataagtaagaatggaataatgaaatttatgattgccaatgttaaagttgctgattgagaaacacctaatactgaaacatctccaggtaatttcaacgtttctacaacacctacagggataccaatcgcaccaaaagcaccagacgctgcatttgcgactaaacataacatcgcagcttttaatggattaaatcctaattgtgttaataaaagtgcacaaattgcaattggtacaccaaatcctgctgcaccttctaaaaatgcgttgaatgcaaatccaataagtaaaacttgaatacgttggtcttgtgaaatatttgtaatactatcttgaattgttaaaaattgtccagattcaacagtaattttgtataacaatactgccatcataacgatatagccaatcggaatgataccttggaagaaaccttcgactactgcaccagaagcgataccaactggcaatttgaaaaatggtattgcaattagtaatgttacaacaagtgttgtaatagctgcataaatacctttcattttaaaaacagttaaacatagtaaaaacagtacaatcggtattgctgcaattaaagacgataataataaattatcaaatgggttaaacgtatttactaacataggctgactcttctttccataaagtagtagtgtaattgcttcattaaaatcatgctctggctatagcattttgttatcgataacattttacagaacagtgagattaatgtgatttttttcacaattaaaatataccattttttcagactattaacaatatcactttcctatttaattgttttatttttcattttaaatctgttcatcaaaatgaattgtacttaatgtaatgaagtaacttatactattcatgaattttacataagaccgtgctaaaataaggaagatactacgatgagaaatggaagttatagcaatgattaaacagataaatgtttctaatatgcaaaagtttgaatctcaattaatgaaagctcagtctgaaggttatacacatgtcgttccatatgccaatgagataatgatttatcaatctatgttagatgcggttcaattatatcctaagtctatcgtggttgattatactgtggatggacaatacaaaaatgattgtcactatttcggtcaatcatcgatcaacattgccgattgggctcaaaacaataattattatcctaacctgatatatgcgattcaacagactcttgatttaatacattattactctgtagaaacgattttcgatttagctttattgacacttctgaaaggtgatttatcaatcgatggtcatgtcgtttttgattttaaagcccctttagcaacaagtgcttcaatatgggaaactattaaaactattgaagattttgatatgatgtctcagttttatttgaataaaatggcttatattgatcatcatcctataccttttcgcaacctttttatcgaggattcagaacaacttaattcgccagataattggttgtattctaccaagtttatgctacctaaatggttatataaaatagcaaagcaacgtgctgataacaaacaattacaaaacttcggcctgtatacgaagcaaccaaacgttttaaaagatcacatcgtttttatcggtgatcatcatcaatatataggtaattcaaaatatttatttacttacttcgttaaacataatccaatgactgcctgttattttgttactgacgatcgtcgcggaccacatttcatatcacctaagtctgaaaaagctgacgaattgattaacagcgcacgcgtagttatagttgaaaatgatatacctgaaacgttacaaccaaacggtactttaattcaattacatcaaggcacaccaataatgcaattatttttagatagtaaagagcctattaaaaatatagaaacacctttttatcgtgctaaaaggtataatcgctggttgcaattcgattatgttatacattctgctgatgatattagccacttttatcaaacggcttttcctagtcaccaagcaaatgtattggcttatggtaatcctaaacaccaatatttactacaaaagcgtaacgaaagtactactcaacaacagtataagaaatcgtttaaaataaatgatcaaaaaccagttttattatacgcacctattggattagtgagtgcgcaacaattaccactatcagatgctttattcaaagcctatcatgttgtggttcagggtgttgatgaagcgatcttaccagaagaggcgcttgttgcaccaaagtatcttagtgctcaagacttaattctaatgtctgatgtcgttatcactgattactcaaatataatatttgatgcgatggttatagacaaaacagtagcattatacactccaaatcacagtcaatacattgagtctcaaggtgttaacgaagatatttggcgtcatctatcaaaaatttggtatacagaccgacaattattaattaataatttaatttcccaggcaataccagtgattaaatatccacaaatacaacataaagaacaaccattagaatctatttcacaacttatattgtctaagatgacatctaatcaatagtgtttaaatttctcagtggctgtgaatgaggtttaaaagtactataaaacgtaaactttgatactttaaaatacgcaaaaaacggtaaaccctaattcatattatagagtttaccgttttatttttttaacttgcatcatagttatattaacattattgttggtagtttggatcagtaaccattgcttgtccagtataatcaaccgttacaattgaatattttccatttgcatttgggtctttaaaactaaacacatacttatagttgccattatgttcttcaatagaataatcattatacactttattattactaccaaatttatttgcttcattattagccgcatttaaagctgtttggaaatttggcaattgctgtaaagcttgagttttatttccattaaacggataaatttgacgtgcaaccggcgcggcattttgtccataatatggtgcaacgtaacttgatttttgattattattcgcttggttattacttgattggttattatttgtttggttttggtcattgtttgttgcatttgaattagattgttgctggttatcgtttgcactattatctttattatctttgtttacgtctttactatcatctttattatctttcttatctttagatgaatcatttgtttttttatcttgttgttcagttttcgctttatcatctttttctttattaccgtctttttgttggtcactatcttgaccacatgcagctaaaaataatgataatgctagtaaccctgtaactaatcttttcatacatatctcctcctataattcgatattcattgaataatcttgaaatacatatctaccatgtgtatcttttcatggcttgttaccaaagacgtcaacattaatatgatctgaattatcacaatatccataactacaatctaaggttctttttattataccctaatttttgttcattattatttaatttttgtgaattttatgttttctataactttaattattttactttaacaattcattacgcatttagcatttcaaggtatacacaatatttattactatgatttcattttatctgctgcaaaaacaatcattataactctttttccataattaaatctgtatccgttacatcacctgtttgaaaatgatgttcaccaaccactttaaatccatgacgtttataaaatgcttgagcacgaggattatgctcccaaactcctagccaaattttatgtttattatgttcttgagcaattttttcggctaattctatcaattgtgaacctcttccgccaccttgaaagtctttcaaaaaatatatgcgctgcacttctaaataggtctcccccatttcttcagtttgagcactattaatattcatctttatatatccaacattcgcacaatcttcttgataaaaataatgaaatgaatctacatggttaatctcttgtgtaaatttttctacagtataattgtctttaaaaaattgatcaaaatctttgtcatcatagtaagaaccaaacgtgtcataaaatgttctagttgctaattcaactaattcactagcatcttgttttgaaatttctttgattatcccagccatataaatcctccaataaacagtgatcgaatcaaaatattacttatgttatttttcagccaaaactatttaaaaatacattaacacaaatcaattacaaattgtattgattgtgtgtaacatcaataaatgatacatttattccagtaaaatggccgtattttcaaaagagaaaaagagaggatgtatcgttgtgatagaaacatttaaagcatttgtaattgataaagatgagagcggtaaagtaacaccaactttcaaacaattatcgcctactgatttacctaaaggagatgtgctgattaaagtacattactctggtataaattataaagatgctttagcgactcaagatcataatgcagtcgtaaaatcgtatcctatgattccaggaatagatttagctggaacaattgttgaatccgaagcaccaggatttgagaaaggagaacaagtaattgtaacgagttatgacctaggtgttagccattatggcggttttagtgaatatgcgcgtgtaaaatcagaatggattatcaagcttcctgatactttaacattagaagaatcaatgatatatggcacagctggttatactgccggtttagcaattgaaagacttgaaaaagttggaatgaatattgaagatggtcctgtactcgttcgcggtgcttcaggtggtgtcggtactttagcagtactcatgcttaatgaacttggttataaagttatcgcaagtacaggtaaacaagatgttagcgatcaattacttgaacttggtgccaaagaagttatcgatcgacttcctgttgaagatgatcataaaaagccactcgcatcatcaacttggcaagcttgtgtagaccctgttggtggcgaaggtattaattatgttacaaaacgtttaaatcatagtggatcaattgcagttattggtatgactgccggcaatacttatactaattctgtattccctcacattttaagaggcgtaaacattttaggaattgactcagtatttactgctatgaaattaagacagcgcgtttggcgtcgtctcgcaaaagatttaaagcctgaaaatttacatgagatcaagcaagttattacatttgatgaacttccagaacaacttaacaaagtaattaatcatgaaaataaaggccgcattgttatcgatttcggtgtagataaatagtattcatgaaaaagacatcccgttttgcgagatgtctttttattttcttttagattatctacttaatcaacattacacaaattaatcaataaaagaattaaataattaaaattcaactaaacggtacacaaagacaacagacagtagagtaaattgtttgttaaatagcaataataccttgatttaataaattttattattataattaatgtaaataactttcaatgaataggtgtgatattttgaaaaagttatataaaaatcgttcgttttctaatttacttatgagtagaattttgataaatgctggtgatagtctctattatgtttctacaacttggatagttttacaatggacgcaaaaccctttactagttggtttaactaatactttattaatgattcctatgtgtatttcatttttatttggtcctttagtagatgccttaccattaaagaagactctatttttaacccctttattacaatgtctattactatcactaattgcttctttaaacctaattggatacttaaatgtatacggcttgatcattttagtggcaattgcaatgttttgcactcaaataggatacccagctcagtctaaagctatacctttattagtaaaaaaagatcaattattagatgcaaattctgctatgagtgtcgcatatcaaggaacagatgttattatgaattcaataagtggtattattgttgcagcaatagctttttttccactatattctattaattcactaatatttctaatagcttgtttatttatgctgaatgtaaatattcctaatataactaaccctgcaagaaataatccttcttatttacaaaatttaaaagaaggtgtgctaggaattaaaatttcactcctactagttgttgcattggtaagtggtgttataaattttggactaggacttctttatacatggatacctttaaaggctgaccatttaggtggagcctattattacggtttattaatggcactattttcaataggtttaattgtaggttcattaatcacaccttatataaaaaaaatcaacttgggatatggaaaattattaatactcttaaatactatttcaggtttaatattaattttagttaactatattccgcgaaatttttttataattttgtttccagtagcttttatgacaattagtattaccaatatatccttagcttctattcaacaaaaggttattccagaacatttgcttgctagattaactacaatcataacaagtatttcagcaatttcattaccgatgggtagttttattggcggaatcctaataaaaaatcttggtattgattatactcttgtaattagtggagcattatttattattgcaagtatcattttctttatatctacaccttacagatcattgcctaaaattgaaaaaatagagcattatcatatattcggaattcagaaaattggaaacaatcattaaaattatacatttttattagttcaatatacttaaataggttttcaaaatagatttagtattagaattgatctatgaaactgactcacaaaatgtcaaaactcaagaagaattgtttactgaatacaaaaattttaaacaaaaaatcactaatgatttattagataaaactagttaattaaatgcttttcttcgtctaatcattggtatatctatctaaatcgggaaatattttcccatcaaaaagacatcccgttttgcgagatgtctttttatttttaaaacttaatatacattccacctgaatctggttcggtaggtataaatccaaattttgtatataatttatccgctgggtagtctgcaatcagactaacgtatgtactctcaacagccacacctttaatatattgcataatatgctccataattagactgccgtaaccttgaccttggtaacttttcaaaactgcaatatcaacaatttgaaaaacagttccgccatcgccaattactctacccataccaattaaccgatctttatcatacaaggttactgtaaataaggcattaggtaatcctttttcagctgcttcgtgcgtctttggactcatacctgcgttaatccttaatgcgcaataatcctcgcaagtcggaatatcatatgtcactttaaccattatttaccccacttttcatcacacaatatatcaacctagtataaatgtttatttacaatagtcttattcgcttctttaaacacttcatgatgacttgaaacataaccctctgcattcgcatctggttggatatatgttttagcaaggttcgctgcatttgcaccatcactaaatgcacttgcaattagatgtgattttgcatcatgataaacaatatctccacacgcatagataccaggtatactagttgtcgtattaccaaatcctttaacacgacaatcatcatgcatatctagctttgaagatgtttcactcaataatgtattacaacgatcaaacccatgactaataatgacatcgtcaaatttaactgtatgcgtatcgccactttcaacatgttccaaaacaacttcacttatatgcgtttcatcatcattgccgaccaagtatttaatacgtgtttttgggcatagtttcacatttaaatctgtcaccaacgttttcatcgcttcatgaccacttacatcttcttttcgataaacaactgtcacgcttttagcaatcttggcaatatcatgcgcccaatccaatgctgtatttcctccacctgatattaatacatctttatctttgaaacgtctgtaactttgtacaacataatgtaaattagttaattgatatctctctacacctttaacatctaattgttttggattaataatacccgcaccaattgcaatgataactgctttcgatgtatatatttctcccgcttctgtttcaacttcgaaatgacgttctgcctttttcctaatatctaccacacgttcattcaaatgaacttccggtttaaaatataatccttgcttaattgtatcttttaaaatttcatgacaaggttttggcgcaatgccgccaatatcccaaataattttttcagggtaaattctcatcttaccccctaattcagattgaacatctatcaatcttacagacatatctcgcaatccagcataaaagcttgcatacaaaccagacggaccgccaccaatgattgtaacgtctttcattatgtgcctcctatgactctctatattcatttctttcattaacgcgctcaaattgataattattatcatttaaagccattatactattaatatttatattgttaaaataaatcgcatagttagccatgaattatcaataactatcccatcacaatataaaaacacacctttcaaagtaagaaacaacaatgttcctttgaaagatgtgtatattttttagttctagttatattattttttaaaagactcatcacgtggttctttaagaattgcttgtcttaaaaggaaaaatagcaacaataaacctgcaagcatacctgtgtgcccaatacctgcaaagcctgcaaatgcttctggagagtatgatttaccagtgacttggaagaatccttttgtcaccatcatacctatagtaacgataacacctatgttatatacatagaagaaccagttaaataagtagtaacttgataatttaaataacttctccaatggtaataatattaaaaacataaacatacctaaaataagtgtatgtgtgtgtacaagtgataattgtgttgtaccagtaaaatcatatgcttttgttagctctctatagaaaaagccactaaataaacctatgatcatataaaaaagaaatgaatataataacctacgcattttgaatcctccctcaccttttcattatatccgattatacctattataacagtgacaaaaaagcgaagatatgacacaactgaatttggtttagcacatagtatgacagctaaaataactttacatcaagcgctatacaaataaaatagctataccatgacgctcgctacaaacgtcttgtatagctattatttctatttattaaattatgacggcacttcagtacgttttgtgctatgttttctaacaatagctgaaactaaacttgatacagcgccaaaaatcataaaccctataaacatccacattgtactatttaattcaatatgatgattcaagtataatagttctcttacacttgttgcatagtgtgtgaatggattccaatcatatacatatttttgataactttcaggcaacatttgtttaggtaacgttacaagttgcatactaaagaacattaaaatgaagaaaattggaactgacttcatacctagccataccataacacctaaaataaggccgacgaaaccaagaatcgcaaatgctacaaaaattgcgatacgatttggatggtcaaaatcaaatccttgaacgccttgcatgaaataaatataaacaaagctacctgcaaatgctgcaacaactgcaaatatcatctgtccaattgaagcaatgatacgatgttgcacgacgatattgttactagttctaaatgcaaagaacaataagatagacgttacgattgaacctatccaaattggcataaacattaggaatggtgcattaccacctgcttggtgatctttaactttattaagtttttcattatccacttttactggattcgtcaaaccattgatgtccgcggcattgactttaacattttgactcgttaatgtttccaaactttgcttcgtaatttgagcattaatattatcacccataccagttaatacagctgatgcaatttgtgaaccttgtaagcttgatccttcacttacaatcgttttaaatttagcctgcttaacctctacttgttgattccccattttttgtttcatttgttgaaccacttgtggcggaatttcacctgaagcaactttttgttgcatttcttcttttttactatccataactactttttgtgttttactcatagcatcttttgaaaagtctttatcaataatagctactccaaagattttttgatctttcaaatctttttcaaggtctttttcactatcaaccttaacccatttaattttattagaatcactatctaataatttatcctctaattttttaccaatgttaacatttttatcttgaatcgttgtacctttatcctcgtttaatataccaattggtaaatcttttggtttaggattatatgcaggataaaaagctaaagaaaagattaccaagataatcatagttgctattggtgcaatccataataatttatttttaaatatattcattttattaattacctccttattagacaatgtgttgaatatttcgcatgttgtctattataatatgtaagtgggaataaacaatacacaatgttcatcaatacgtttattaatagacaaatacacccgcattgttcaataacacgaggaggttgatttatttttgaaagaagataggcgaattagaaagacaaagtcctccattaaacaagcgttcactaaattactacaagaaaaagatttagaaaagattaccattcgcgacataacaacacgcgctgatatcaatagagggacattttacttacattacgaggataaatatatgttactcgcagatatggaagatgagtatatttcagaactaacgacatatactcaatttgatttgttacgcggttcttcaattgaagacattgcgaatacttttgtaaataatatactcaaaaatattttccaacatattcatgataatttagagttttatcatactattttacaattggaacgcacgagtcaattagaattgaaaatcaacgaacatattaaaaataatatgcaacgttatattagtatcaatcattccatcggaggcgttccagagatgtatttttacagttacgtttccggagcaacaatttcaattattaaatactgggtaatggacaaacagcccatttcagttgatgaattagctaaacatgtgcataatattatttttaatggtccattaagaataatggcagaaaaccgtttgcataaatcaaaccttgattcactaacttaagtaatactcgcttttcctaaatcctttagaaaggaactatatatcatgattacttcattcagacattctgaagatatagataaacatattataaaaacaccattagatcatacagcgtcatggattaatgtagtagaaccagaccgagaagaaattgaaaatcttatggaacaatataatatacctgaagactttatacgtgaccctttggactcagaagaaagttcccgtattgaatatgacgaagatactggttactcattaatcattattgatttacctatcgtcaattcaactaatcgtagcgttctatcttttgtaacgattccattaggcattattattggcaacggtattatcgtaacagtttgtgacgctgaaaatgaatttttagaaaatttacctaagcgtgatattaatttaaaatttcacagcagatttgcattagaaattttaactactattgccgaccattataatcgtaacttacgattacttaataaaagtagaattcgtattgagaaagaactaaaaaataacattactaacaaacaacttttcaaattaatggaagttgaaaaaagtttagtatactttttagctgccttaaaaggtaacgatacaattattaaaaagttattccgtttacctgcaattaaacgttttgaagaagatgaagaattactagaagatttaatcattgaaaataaccaagccatcgaaacaacagaattacatcaacgtatcttagaaagtatcacaacatcatacgcttccttattatctaatgatatgaatacgattatgaagacattaacacttttcacggtactattaacgttaccaacactcgtatttagtttcttcggtatgaatgtgccgttgccaattgatgaccatagttatatatcttggattattgtggtaggtatttcattaattcttgtcgtaattgttagtattttcttatggcgtaaacagaaattataactaaattaaaaggtatgacagcttaaagtttcatcctattgcatttgcaatgactgatactttgattactgtcatacctcttttttattctacaacttctttatttgcttttcttttagataaaattaaagtaactgttatagcaatgatgaatgatattgtcataccaacaaagtagtgtaaccatcctgcatgtactggattgattgaaataaatcctggcaatccagcagttcctaatgcgattgctttaaccttgaagaaagcaatatatgctgaaccaatacctgatccaacgatagcgccaataaatggatatcttagttttaagttaacaccaaacatagccggttctgtaataccaagtaatgctgaaatacctgcggcagatgccacaccttttaacttcttattttgtttaataataaagaacgctgcaattgctgcaccaccttgtgcaacattagacattgtcgcaatcgggaatataaatgatccacccgttttagtggcatctgcaattaatgtcgtttctacagctataaagctatgatgcatacctgtaataacaatcggagcatacaataatccgaatattaatccaccaattgcaccaccaaattcataaagccatgttaaaccatctgataaccagtaacctaattgtcgagtgattggacctacaaatgaaaatgttagaaatgctgttataaaaatagataacaatggtgttaacaaattatctaacaccgttggaataactttgcgtaaccctttttcaattgaggctaagatataagctgctacaagcataggtaacacttgtccttgataacctacttgattaatatgcaaaccaaaaacatcccaatatggaatagccttacctgcttcaactgcttttgggaaatcgtatgcgctcattagcgatggatgaactagtatcatacctaatgcagcacctaaaaatggattgccaccaaagcgttttgctgcactaaatccaattaaaattggtaataatgtaaatggtgcattcgcaaaaacatttatcatttcagctaatccagcaaattgactatatacatctatcaatgatttacctgaaaagaataaatctttcgcagtcaaaatgttatttaaccccattaataaaccaccagcaacgatggctggtataatcggaacaaagatatctgaaagcatttttacaaatcgctgtaacggattcatatttttagcagattgtgctttgacttccgaagtggttgatgcttcttttccagttaatttttccagttcactaaatactttattgactgtaccagacccaataataatttggtattgtcccccagtagaaaacgtccctttaactacatccatattgtttagcgcctcttcatttactaaactttcatcatttaaaactaatcgtagtctcgttgcacaatgcgccattgcatctaaattctcttctccgcctatcgcgttcaaaatttcttctgcggattgcttataattcatatatttagcctcctaattagaaccggttccatttattccactttattgtaaccggttccaaaaatatttgcaacactctattatcattttatataaacacctacaccatttttgatagcgcattcatttttattgctatactacatgcatgtatattaacattaattatcggaggtaattttatgaaagaacgtggctatatcgaacagctttggcgtgaggaaaaatatcatgtattgttacacagtcaacagtcttaccaaatgataaggaatgctttaaaaacggatttatcacttcatcaagttcaacaaatgattgatgatgctttgttaattgaaccgagtataggaagtgtatgtaatgcttttgatcatatgtggggatattttaaaaaatgtgcgaatgaagaagaaagacaacaatcaaaactacttaaagctgattttattaatggtaaaatcgacacccaaactttattagattttttagcagaacttgctaataaatatgatgttcaatatttactacaaagtcgtgttttaaacacaaaaagaaagagatagattgaaactttagttgtaacggacaaatagtagtcattggagttcagcaattcatactttgtactaaagtttactataatctatctctcaaggtttaaatgtacatatctatattaaaatgcgtttcatgatgttagaagataccatacacatttaattagttacagcataaatcaatttatacccttaattattacattgtttatattttaaattcgggggagtaattttaagtaatatcttgttgctgctaattctattgttaataaattgatattagatgtagaaattgagtgtgaaagttaataatagatgatttagctagtaacataattaattcatatatagtcaaaaagttctgttagatactgttcttgatgaatattctttgatgttaggtgttagctattctagatgagtttcttagatgtggatgcctgtcttgatgaagttatctatgatgttaatataatacttgatgttgattcttagatgttagtgcgatttcaagatgctgattctttgttgttgcactatcttggtgacgtttctagttgtttatagttatcgcatctcttgatgtaaaatctaagatgtttatgcatttctagatgttaattcttcgctgcttaagaattatcttgatggtaaatctagttgtgccatgcattttctcatgatgaatctaaggtgttaattcattgatgtgtgctgtttcttgttgcttcattatcttgatggtgaatttcgttgtctaatgcactttttcaaatgattattctaattgttacggcaataactagatggattttcttagatgttcacttttctagatgtttatacttatcttgatgttttctaaacagaacttttaaacgctttattttttagtagattgtttaaaatttcttagttgatggttattgttgttgatttgaataatttgtagcgaatattttgtaacagggctactaagaatttttataacaagaagtgatttcaatcgtactaattttcagcgtttgatgacaaaagtgtatgtccaaacttaaataatggcgataaaatttaagtcatgggtacatttaatgttttttgattcaaacttccattttggtcaatttgctttttttataacatagttgaatatcaataaaagattagcaagttagttcaaaatggctatgtattgttttttgaaatacataggtttgaaatctatattaattatgcaccaaataatttaattagactctatcgaaaatttccaaattttgcttactatctttctaattttacttttatattgtgcacaatgcataaaaacaagcgttttcctaggagttttcattaatttcttttatttttcactattaccttttcaaaaatattcaactataataggtatactatccatgattttaaaaatttccatgttttacatttaaatgatagatttcaatatatattaggcaggagagagaaatatgacatgccaacttaaaatacatcatacattatcgacaataccaagtcgtaatattaataatattatggtgctattttcacttacaagtaaactcaatattacgattaatggtgaaaccaaagacgtaagtaattatattatcttaattaaccatggtgatatttataatattaaccacggcgaaaatataatcgaattaatgatacccgttttttatttttatcaacaagatgatgatttctttaatggttatttagatcgtcatttattacaatcaagtaattatattaagtcattaattgccgatttaatcagtacaccaacaagttcttctttaatggggaaaaatataggtcaaagtattatagacactttacttaaagaagcttttataagaatagatcatgaatatttaccaaatattgctttaagcaatccggtgttcatagactgtgtaaactatattcatgacaatattgatgcgcacttgtctttaaaagatatagcgatgcattgcaacatctctgaatcatattgttctaatctttttgttcgatatttgagtatgaattttaaagattattttacaagtattaaacttgttaacgccatcaatttattactttctacaaaacattctattacaactgtttctgaattggccggttttaacagtcatacaaattttgcaaatcaatttaagaattacttgcattttagtcctaaacagttccgttcactcgtttccaagattactgaaccaccacaaatacacttccaacaagataacgtatcacaattcactgagttaatttcaacaattgatttaacagctcaactggctacaaatacaacagatattcatatagatgattttaatccgaaagatcgaagtcagcgtgccaaagtatttgttcgatttagtaatttcaatgaactatttcaatttattttcaatgaatattacgatattaactttgagcacttaccaaaacctgtcgttttcattgacgatattcacgatattgagattagccaaacgaattacaacctgttaaatagatgttttgaaaagcttttcgaaaaaaatataggtttagcaatcgctattaaatcaacacaacaattcgaaacgatgaagcaattaatactcacatttttacaaggcaatcaagactataagacaagcaagaaattagttaaatttatgctcgtattttgctctaattctatgacagcagaagaaattcatttatgtcatcttaaaattaaaaacaaaaataaagaaattaaatatagtgtgacagtcgatggctttttagaaacttattcaaccgtggaacaagtttatgatgtcatgcagcgtcttaaattccattattactttattgatattgaaaattcaaaaactgcaacacatcttatcactaaaaaccaacactatcatcaaactgacactcattttgaacagtataagaaatttattttagattcaggtatatcatcaacacaatttgtatataataacctgtctgtaagcggatttaaatatactaatgatggtaagaatccaattcaattatctgacatagtgtatcacttaatcgcattattacgatatggcggtggcattagctatcaattattagatgaccattcaaattatatttccttgtacaacaaatatggtagccccctaccattaatgcatttatataaaatgtttagaccttttgttaatgaagatattgaaattacaaataattatgtattgagtcgtaaagataataactaccatttcttattattcaataaaattaatgatagatatatgtcagacgtaaaacaagatttcattttccataatgaattacctcaagactctttgatgattattaaaacattgaatcatgaacatggttcaattcaacatttgcttccaataagcgatcaacttgtttatatagaaaaagaaattttagatgaattagacaaaacgaattaccctaaaacggagcttgcagttcaagaagaaactggtcgtacatttgaactcaagttaaatcacgacgaggttaaatatatttgctttaaaccaagctaaatactaacagtcttcttgtgtttagtttcttacgttaaaggctatttatatcataaggagatgatatgtaatgagtaactcacaagcaattcaagcaattgaaaacgtgttagcaacgtcaaaagttggtgtattatcaactgcatataataacaaacctaatagtagatatatggtcttttataatgatggtcttactttatatactaaaacgaatatccattctgctaaggtcaaagaaattaaagaaaacccagcagcctatgtattgttaggttacaatgatacgacaaatcgcagtttcgttgaaatggaagccacgatagaagtagttactgatcaaaaagtaatcgattggttatgggagactcaagataaaagctttttcagttcaaaagaagacccagaactttgtgttttaagagtagttccgcaatccattaagctaatgaatgataaatcattagatacacctatcaaaatcgatttataacacaaagtatatataggaaataacttttatgaattctagatataacaatgttaaatacttaaaataactcgctataattaaagtgtttaatatgtttacaattcaatttgcaatgtattgttttttagacacactttattcacatttaacgtgattagggtgtgtctttttaaattaattttatgtaatataaatactgcatttgcaaactgttgcacttttaggtataacagaattaactacatttaaggagattgatgaaccatgaaaaagaaaaaaggttttggtcttggtattagtttaatcgccatcatgttaattgtatgtattgtattagtaatcatgatgatgactggcggaaagaaagatacatactatggaattatgaaagataatactactattgaaaaaatgattagtgaaaaagatgaaagtattgaaaaaaatgttaaattaccttcagattcagatgttaaagttaaaaaaggtgattttgtaattgtttataaattagcagattcagataaaattgttaaagttaaaaaagttgaccatgatgacgtccctcacggtttaatgatgaaaattcatgacatgggcaaaatgcacatgaaacactaattaagctttaattttgagtaatatagaagatattaaaagcagcagtaagatgttttctaattgaaaattatcttactgctgctttttaagaattactgtgtcagtctattttcggttcgcctgcgctttagcgcatgcataaaagcccctaacaacctgagatcactgcgcttcggttcgcctgcgctttagcgcatgcataaaagcccctaacaaccaaaggttgtaaggggctttaaatgtcagatagtattttttaaattgattttaaatattcttgaccttttgctttgtcatatacgttttcccatttagctataacgattgttgataatgcgttaccaataacgtttacacatgtacgtaccatatctaagatacggtcaacaccaataattaatgctaaaccttgtgccggtaagcccatggcacctaatgttgttaataaaacaacgattgaagttcctggtactgccgccatacctttagatgtaatcattaatgttaacatcaacacaatttgttctgataatgttaagtgcattccatacatctgtgcaacgaataatgctgcaatagattgataaagtgctgatccgtctaagttaaacgtataaccaattggtataacaaaagaagtaatttcttttggagaaccgaagttttccattttcttcatcattacaggaagtacagcttccgaacttgatgtagaaaatgctaaaagcaattcacttttcaagattctaataatattcatgatattaataccacacatccatgcaactagtcctagtatagcgaatacaaagaacaccattgcaaagacaacaactaatactaattttaatagtggtaataatgcggatgcaccaaatgtaataattgtagtacaaatgaatgcaaacactccaagtggtgctaattttaaaattttattaatcatccagaacacagcttcaagcgatccgcttaaaaattctttaactggttctgcttttttacctacagcagctaatcctaatccaaagaatactgcgaagaagataataggtaataattcacccttatttaaagcttcaaaaaagtttgtcggaataatatgtacaatggtatcaataaaatgatttccatatgtagattgttctgctgcatgtgcagttgattgatatttagaaatatcacctttaggtaattttgttgggtctaatccagcacctggtttaaataggttaccgaagataatccctaaacctattgcgattgttgtaataatttcaaagtataaaattgttttccagccataacgccctacagttttcgattccccaacgttcgaaatagaaagcgctagtgagcaaaatacaactggtataacgatcattttaattaaatttaaaaatacgtcaccaaatggtttaatgtaatttgctacgttttcttgtccatataataaaagtcctacgacaacacctaacactaatgcaataacaacttgcataggtaggctaatttttctcttgaatagagccatagtacaaactccccttcatctgacatcactcaattatatcagaaaattgataattatctataaaaaattaaaatatttatcttttatagatgtcaaaaatcactaatttccatacaaaaactgtttacctcaaataattaaaattgaaggcactaaactgtttcaccagttatacgttacactattttgatggtttataattttgattaaaatatttatgctttgcagttttcaaacttttcttagtctctgtatcaaagccttcaacaaataatcctttattagtactgattggttgcacaacataagttacaccaggttcatctttaaacgtaacttccttatagaagagaccttttttagcactatactccgttttttctgatttaattttatcttttagatttttctcttccaagtaactgtcaattagttgaatattcttatggccttgatatgttttcagaccaaagaaaaatgctactgcaacaattaatgaaataaataatataatgataactttaatcgcgttttttttcttcttcattatgtaactcctttttgcttatctattcagtatgaacgaatcaatttatttaataaagagtttttaccagattgtaacaaatttttttattctcaatattattatagaaatcgaattacatacacgatgcttttaaaaaatttaataacaaatttcattttactatctatcaaaataattgactacttttaacaattaaggatgatacaattacatttttttcaatttaaaaaatcagtcatatcagtcattaccgatgaaaatactaagatatcgatatattttgcattatttaacatttaaattcaattatagacaattcaataattgcgatgaaatcagtacttgacaactattacacttcataatattgtttattttaacaaggagtgattggatgtatgtagaaaacagctatcttagcaaacagttgtgttttttattttatgtttcttcaaaagaaataattaaaaaatacacaaactatcttaaggaatatgatttaacctatactggttacattgttttaatggcgattgaaaatgatgaaaaacttaacatcaaaaaattaggtgaacgtgtattcttagattctggaacactgacaccattactaaagaaattagaaaagaaagattacgttgttcgaacacgtgaagagaaagatgaaagaaacctacaaatttctctaacagaacaaggtaaagcaataaaaagccctcttgctgaaatttctgttaaggtctttaatgaattcaacatttcagaacgagaagcatcagatataattaataatttgcggaattttgtttctaaaaattttgactattccgacagaaagtaactccctatcataaggtgatgggcagaagtatgcatcactatgtttattcattatctttattgcttgtataaatctcgatgctcagttcttttgccctgattccttatcaggcacaaatctacccatttataacttttttatctccccttttactttatcttttttaatactactcatataatggctttgtaatacaaatttatataatggaagtgatgatattgaacttcaatcaattcgagaatcaaaacttttttaacggtaatccaagtgatacatttaaagatttaggtaaacaagtatttaattacttttcaacaccttcatttgtaacgaatatatatgaaacagacgaattatattacttagaagctgaactagcaggtgtaaataaagaagatattagtatcgatttcaataataatacgctcactattcaagctactagaagcgcaaaacacaaatctgaacaactcattttagatgagcgtaacttcgaatcattaatgcgtcaatttgattttgaagctgttgataagcaacatattactgctagttttgaaaatgggttattaaccattaccttgcctaaaatcaaaccaagcaatgaaactacttcatcaacgtctattccaatttcatagttaaatttaaaatgaatacactactaaagccttaatgtcatgctacgaatattgcgcatgatattaaggctttgtatttaactaaatgaatatcatgtattacatatcaaccgtttttcaatgagccatattctttttggtataaatgacgcatggtaaataatgcaatacatccaaataccgctaagaaaataaatgctaaatgacttgatcctgttaaattagctacgtatgtgattactagtggtgggaagaatcctcctaaaccacccatcattgatacgataccatttgcggatcccgcttcatttaagaagtatgatggtactaatttgaagattaagccgttaccaatacctgcacaaatacttattgttaaacagcctacagtgaataatgcgatatggtctgaaatacctaaaataatggcaccgataatcataacaacaaaatcaatcttcaatactttaactgcattaaatttatcacctaaaatgccacctattggtcttaagaatgttgccagcgcaatgaatacacctgatcgaataccagcatctactttgtcaattccaaaatgatttactaagtagttaggtaagaaaataccaaatgctacaaaagcaccaaaagtaatgaaataccaataacttaagtaatataatttgtagtttttagataatgttttcatttgtgccattaatggcactttaattttacgttcttgtgtatcaccaaaaataaacataattaatgcaaataaagcgataataattaagtaacttctaacagttgtttgccaaccaataatacccgcaattggcggtgctaaaaatgaagaaactgctgtaccgatatttcccataccataaataccatttgctagacctactttttctttagggaaatatttaggaactgatgtaacaccaactgagaaaattgcaccacctacaccaaggaaaaatcctgacgccattaacatacccggtgtttgtgcttggcttaagaaaaatatcgggaataacaatacgataaaactagtaaagaatacccatttagcgccaacaatgtttgttaaataaccaaatggcacacggagcaccgatcccaaaataactggtatcgctaaaatgattgatatttgaccttcagtaacattgacatcttgtttaataaagggcattaatggcgcaattatactccaagccataaacccaaccactaaacttaatgtttgtaatgtaagttgaaagccaccttttgttttgtacatacgtttcaccttcatcaaaatcatttattttttaatagatatcaatactctgcctatatattagaggtcaatgttatttaaaaatgctttcatttatatgaaaacattcaatatagacaaagtattgactacatatatattttattatgattgtgaaaaagtgaacataaggattttcccttatttatgaagtgatttaccctatacaatgtccctttaagatgcttttagacacttattcgccatcattttaatcatattatttaggaacactcacatacttttcaatttcaaacatcctccccattcataaacctaattcttagtcataactatctgcatatatttaatgataaaacatacaaaagcgccagaagataatcatttcctctcgcgcttttatactgaattatattaatttcaaactctaaaactctaataatttctttttcaatgcatattcaactagctcaggtttactctttaagccaagctttgtcataatatgcgtcttatgtgcttctactgttttcacagatacaaataatttctctgcaatttctttattcccgtaacctttggcaataagtggcaatatttctagttctcgttttgataagattttaaaaggatctgttgtgtttgcagtgtcctgatttgaattagatacaaattcattcactaaagatgttgtaagtttcatatctacatatgtttcacctttatatacagttcgaatagctaacaataattgttcatcaggtgcatttttcaatatgtaacctttcgcaccattacgcaacacatggaacaaatactcctcatcatcaaacattgttaatattagtattttagtttcaggaaaactgtcagcaattttactcgtagcgataagacctgactcacctggtggcatacttaaatccattagtaacacatcaggtttatattccattactttttggtaagcttcgacgccatctgcagccgttgcaacaacttccatatcattttgataatttaaaatcatagagaaccccgtacggacaacagcgtgatcatcggcaatgactattttcaattttattcccccaatgtatgtttcaaattggaatgttcaatgtaacattggtaccctcaccaattttcgtttcaatattgacgctaccgctgactaactcagctcgctcattcattccatataaaccgagtccagaacctttaggcttagaacttggatcaaaaccatttcccgcatctatcacttctgctaccaaatggcgcccagtttgacggatacctacatttatttcatttacatcagcgtatttcaacgcatttaaaatagcttcttgcactactcgataaacaaccgtttcaatatcactatcaaagcgagtatttttaatatttgatgtatatatgatttttattccataattttcttcaaactgtttaaaatatgatttaaaagctgcttcaaggcctagatcatccaaagaagcgggtcttaattcaaccgacatattacgtatatcatcaattaatttagcgacaatatattcaatattttctgcgtcttccaaaagcttagttgtatcttcttgatattttaataatctcaattgaacatctacattgagcatttcttgaatcacactatcatgtaactctctagaaattcgctttctttcattttcttgggctgagattgttttacgcatcatacgttgttgatgcaatttctcttgctgttcaatttgtgatgaaacattttgaagcgtaaatgcatgaattcccctgtcttgatcaatcaactgatatgttgctgtaaatggcatcactttttgatctttcgtcttcataaatacttggaaattcgtagcttgtacttgcatcgattctaagaaacagtctttacatgattgtacatcataggcatttgtatacccttcacatctgtgacaaatcgcattcgccacagcactgtaattatcttcttcagataatatatctttagcagcatcattcattgcaataattttgccgttatcatcagcaaaaactatcttttcgattgaatgctcataatattttttcaataaagtatctaactgtatactgtcctcattaatcatgacttacaccctaattcatctcattatttatcatcattgaaaataccaaacttacgttgaatatcatcattatcaaatatttttggtaaaggacgaccatctctttgaccaaataatagtacgccatacacttgattcttataccaaagcggcactgctaaaactgctgttaatgattcgctcaataaaattggatagtcaatcttttcttcaggccctaaagctaaaccaacattggctattaccatacgctttcctgttttcataacagttccagctaatccacgaccttttcttaaaataatcaatttaaatcgattatttttattacctgaaacatagtgccattttattggagatgatggtttgttagattcatagaaagcgattgccgcaaaatcataaccctcttctttgcgtattttatctaatgtctcttgaaatctacgatcttcaattattgcttctggtgtcaaatcctttcacctcttatgcttacactttattcttacggtaaataatatatctgcgatttatatatgtcaaaggtacactccaaacatgcaccaaacgtgtaaatggccaacaagccataatagtgaaacctaacaatatatgcattttaaatgcaatcggcacaccactcatcaatgacgcatctggttttaacataaataattgtctaaaccaaattgataatgaagttctgtagttaaaatctggatgttgtatattggttactaatgttgcgtaacatcccataaatacgataagtaataataagaaatttacaaatatatccgacgctgaacttaatcttcgaatacttttcgtagtaacacgtctcgctgttaataaaaacatccctatcaaagttattataccaaagatgctaccaatataaacagcgcctatatgatataaatgctcagacacacccactgcatccatccatgatttcggtattaacaatccaactacgtgtccaaaaaacactggaataatacctaagtgaaataataaacttccccacatcaatctttttctttctattagttcactagatttagctgtccaagaaaatttatcataacgataacgtgcaatatgacctgcgacaaagacaactaaacataaatacggaaatataacccataaaaactgattaagcatgatgtttcactccttttggtgatgtcaaacataatttcaatgtttttctaagtgcttgaatcacataggcatatggattgttatcttcaccaagtgcattcgccatcacatatgttccatcctcaataatcataatgattaattgaatattctcttcagctcttggatcatttcgccattctgccacttgcaaaaattgaagcatcaacggtagataatcagaaagttcattatctaccatttctagtccaaacatttcatataatacctttaatttagctaacatttgcccacgttctttttgcgtatcaaatttgttatacgtcatatataatggtgcttttttcgtaaaatcaaatgtatctgtataaatcgctttgatttctgataatgaaaatgtcatcattacatttctaaatgctactaaatcttcatatgctggatgatctgtcgaaattgtttcttcaaaagtttttggatgaaaagttaatttttctggaaagcataactgttgtgccatatatccaaaactttcttgatattttttaaaattatcgaaattaatcacggaaaatccctccatagaaattctcattataaatttcttgaccagttttccctgaacctactgcaacgccacagccttcacagttatctccaaaatgctcgccgccgtaattgtatcctgtactaccttgtgcgtgatacgtatctaaataggtttctttgtgtgatgttggaataacaaatcgatcttcatatttggctagtcctaataaacgatacatgtctttagtttggcgctcggttatacctaatcgctctaatcgagacgtgtcaaatggctgttgagtaacttgagatctcatataacttctcatcattgccatacgttgtagggctccttttactggctctgtatctcctgcagtgaaaatattagctaagtattcaataggtaaacgcatttcttcaatggctgggaaaatcgcatctggattttgagttgtatttttaccttcaaaatagctcataattgggctaagtggtgggcaataccaaaccatcggcatcgttctaaattcaggatgtaacggaaatgcaagtttatattcaattgctaacttataaattggagagttttgtgcagcttcaatccaatcataaccaataccatctttttcagcttgagcaatgacttcttcgtcaaatggatttaagaatatatctaattgtttttcgtataaatctttctcgtctactgctgaagccgcttcatgaactcgatctgcatcatataataaaacacctaagtaacgcatacgtcctgtacaagtttcagagcataccgtaggcatacccgcctcgattctcgggaaacagaatgtacacttttcagctttgttcgttttccaattgaagtaaactttcttatatggacaacctgtcatacagtaacgccatccacgacatgcatcttggtcaactaatacaatgccatcttcatcacgtttatacatagcacctgaaggacacgatgcaacgcaacttggattcaagcaatgttcacataaacgtggtaaatacatcataaaagtttcgtcaaattggaatttaatatcttcttctattttttggatgttaggatcttttggacctgtaacatgaccacctgctaagtcatcttcccagttaggtccccattcaatttcaatgttatcccctgtaatttctgaatacgctctagcaactggcgaatgcttccctgatttcgcagttgttaaatgttcataattatagttccatggctcataataatctttaattaatggcatatctgggttataaaaaattttacctaaagcaatttttgaaattctacttccagattttaattcaagtttccctttacgatttagtacccaaccacctttgtagtgttcttggtcttcccaacgtttcggataccctacacctggcttcgtttctacgttgttgaaccacatgtactctgcacctggacgatttgtccaagtgtttttacatgtcacactacacgtatggcatcctatgcatttatctaaatttaataccatcgcaacttgcgctttaatcttcaagccaattaacctccttcatctttctaactgctacatataaatccctttggttcccaattggtccataataattaaagtgataactaatttgtgcgtatcctccgactagttgtgttggtttcaaatggattctagtcggcgcgttgtgtgaaccaccacgtgtatctgtaatttctgacccaggcgtttgaatatgtttatcttgtgcatgatacataaacattgtacctttaggcatacgatgcgaaataactgctcttgccgttacaacaccattacggttatacacttctagccaatcattatcttggatatcgtgtttttcagcatcttcatttgatatccaaaccgttggaccacctctaaatagtgtcaacatatgcttattatcttgatacattgagtgtatattccattttccatgaggcgttaaataacgcagtaccaaagcatctgtaccacctttaattttcttatctctattcccaaataccattggcggcaatgtcggtttatatactggtaagctctccccaaattgttggaaaacttcgtgatccacataataactttgacgtcctgttaatgttctaaaaggtactagacgttctatattcgttgtaaatggtgaatatcgtcgaccttgtttatttgaacctgggaatactgctgtcggtattacttctcgtggttgtgaagttatatttaaaaacgaaattttctcagcagcacgttcgctagaaatatcttttaatggcattccagtttgttcttcgagatcttcatatgatttttgtgataatttaccattcgtagcagatgaaatacttagtattgcatcagctacattacgtgctgtatcaatacgtggacgattcgctctcacagaatcatcatttgtatcactccacgtacctaacatactttttaattcttcatattgttcactgacaccgaaacttacaccatgtgctccaactttccctttttcaagtacaggaccaagcgtgacatatttgtcgtaaattttagtgtagtcgcgttctacaattgcaaagttaggcattgtacgtccaggtaccgcttcaatttcacccttcgaccaatctttcactacgccgtatggtgttgaaatttcttgctttgtatcatgactaagcggagttgtcacaacatctttaaacgttccaggtaaatagtcttttgccatttctgaaaatgcttttgccaacgttttataaatatcccagtctgaacgcgattcccataatggatcaatagctggattaaaaggatgtacatatggatgcatatctgtagatgataaatcatgcttctcataccaagtcgctgctggcaatacaatgtcagaatataaaggtgttgctgtcattctgaaatctaaagaaacgactaaatctaatttccctgttgtttcctcacgccacgtaatttcttctggcttttcatcttcatttggtgtagctaataaacctgattttgtgccaagtaaatgcttcataaagtattcttgaccttttgcagaacttgagattagatttgagcgccatataaacagtgatttcggatgattctttttcaaatccggatcttctatcgcaaattgcgtttgttttgacttaacttcatctatcgcgcgttttaaaattgcctcattcgactcaatgccttcatctttagcttcttctgcaaacaacaaactatttttattaaattgtggataagatggtaaccaaccaagtctagctgctaaaacattataatcagctggatgttgatgctttaactcctctgttttagctaatggagattttaaacgatctacatttgactcttcatatttccattggtctgttgcaaaatagaaccaacttgttccgttttgcaaacgtggtggtccttgccagtctttcgcaaatgcgacagtactccatccttcaatcggacgacatttttcttgtcccacatagtgagcccaaccgccaccattcacaccttgacagccacataacataactaagtttaagattgaacgataaatcgtatctgagttaaaccaatggttaatacccgcacccatgataatcattgaacgcccttcagtgtcgatagcgttttgcgcaaattctttcgctacttgaatgacaacactttgttttacgcctgaaatggcttcttgccaagcaggtgtatattttgattctgcatcgtcgtatccttttgattctaatttatgatcaaaacgacgcacgccatattgacttgccattaagtcaaaaattgtagcaatacggactttgtcaccatttgctaaagtgacttgtcgagttggaattggacgattgaatatcccatctccatcactatcaaagtatgggaattgaattgtttctaattcgtatccaccatctgtcattgatagtgtagggttaattttagaaccatcttctgtttctagttttaagttccacttcttaccatcttcccaacgttgacccattgtgccattaggtactactaaactatcgctgattgcatcatgaataactggcttccattcgccttgctctgttgtttgacctaagtcactcgctcttaaaaatcgacccgctttatatccattttcatcttcatccagcatgataagaaacggcatatctgtatattgtttagcgtaatttataaagcgttcattaggttgattaacataatgttcttgtaaaataacatgcgtcattccttgtgcaattgcagcatctgaaccaggattcggtgctagccagttatctgcaaatttcacattttctgcgtaatctggtgctactgaaatgacttttgtacctttatagcggacttcagtcataaaatgtgcatccggagtacgtgttaaaggtacattagagccccacataataatgtatgatgcgttataccagtcacttgattcaggcacatctgtttgctctccccaaatttgtggagaggcaggtggtaaatctgcataccagtcataaaaactaagcatttcaccaccaagcaaattgatgaatcgagcacctgctgcataactaatcattgacatcgctggaataggtgtaaatcctgcgattcgatctggaccatatttttttattgtatacagtaattgtgctgcgattatctctgtaacgtctttccaatttgaacgcacgtgccctcccatacctcgggcttgcttatattgtttggctttgtcttcattttcaacaatagacgcccatgcagcaacgcgattaccattgttttcttctaatgcttcagtccataaatcccagagttttccacgaatatatggatatttgattcgaagcggactgtattcataccaagagaatgacgcacctcgtggacatcctctcggttcatattcaggcatatccggaccacaacttggatagtcagtttgttgattttcccaggtaatcacaccatttttcacaaatactttccaagaacatgagcctgtacagttaacaccatgtgttgttcttacttctttatcgtggctccaacgttctctgtacattttttcccattctctacttttactttctaggatcgaccaattcccattaaatttttctgttggcttaaagaaattcaatccaaattttcccatatttatatcctcctacgtataaaaatacgatgtgtagatgtcgtgtttttaaatactttaaaatgcccaagactattgctttaattagattgtacattttttcacaaacataaaatattagggaatcacctaattacttaaggaatttccctatcaataacgggatttcattgaaataatacacaatcatgtatggtcgtgcttattgccaatctaaatcgttcaaatttggcacaacgacaaataaggcttcaacacgaatatattctctcggttgaaaccttacttattcatttattttttataaattagtgacataacactgtattagcatctgcatgatcggttgaaatatatgttacattttcttgctgcttaataaatacatcatagtaatcatattgcgacgaatgatatgtgccattcgatgtatcatttgggtttagcaaacagccataaccttcgtcatataaatgttcacagagcataagggcgtcatgtttagaaccacttactacataaaattgcttcataggatcatatgatttaggagtgttttcagtataaccaacaacttccccaataatacatatacctggtttcgcctcaattgaatagtgttgcaattttgaaataatattacttaaacgccccttaacaacaaactcgttaaaacacgatgcttgaaagacaatcgctatcgggtaatcaatatctgtgtattgttgtatctgtgtgataattttccctaaacgttttacccccatataaattgctaacgtgccaccattcactaaggaattgacatccacttcattttcttctgaatctttaaagtgacctgtagaaaatgtcacacttttagcaactgtacgcattgtcaaacctgtctgcatagtagcaactgctgcgctcgctgatgtcacccctggtacaatttcaaacgcaatatgatgttcatttagtgtgtcgacttcttcttgcactcgtccaaatattgctgggtcgccacctttaagcctcacaaccttgttatatcgacgtgctgcttccacgatacattcatttattttttcttgctgaatgtgttttgcatacggctttttaccaacatcgataatttcagtagtcaaattcgcatattgtaaaattaacggattcactaatcgatcatatagtataacatccgcttcacgtattaaacgctcagcctttttagtcaaataattcggattacctggtcccgcacctatcaagtaaaccttgccatatttatctacagacatatatatacgttcccgtctgtaacttctacctcataaacatctacacaaccttcatcaggttcttgaacaatacctgtatttaaatcaattttttgatcgtggagcgggcaaaatacatattccccactcactgtcccttcagacaatggtccttgtttgtgtggacagatattgtgaatcgcatgaattttgccactttctgttaaaaacaaccctacctctttgcctttgacaataaccttttttccaattaggggtgttaattcatctatagttgtcactttaattttttcttttgtttccatgtattacaccttctccacttcaaaaattttacgtgcttgcgcattgctagttattgcttcccaaggttcagcttcgactgcttttttagcatccataatgcgttcaaatagttcattttgtctttctgggtcaagtaagacttcttttacattttcaaatccaagtcttcttaaccatggcgctgttctttcagcatatatacctgtttcgcgataatattgcatcaaagcaccacataatttgattacttcatcttctgtttctacagttgttaaaaattcagctttttcaacttctgtaccaccattaccaccgatatagatttggaatccattttcaactgagataataccaaaatctttaacacctgattcaacacaacttcttgggcagcctgatacacccattttgaatttatgaggtgtatcgatgtattcaaatgttttttctaaacgaatgccaagtcgtgtcgtgtattgcgtaccaaatcgacaaaactctttaccaacacagcttttaactgagcgagttttcttaccataagctgatgctgaacgcatacctaggtcttcccatatatttggtaattcttcttttttaactccatacaaaccaacacgttgtgaacctgtcactttaactagtggcacatgatatttcttagccacttctcctagacgaatcagttggtctgcatctgtaacacccccacgcatttgaggtataacagaaaatgtaccatcattttgaatattcgcatggtaacgttcgttagcaaatcttgattctctttcatcttcatgatcatgcggataaaccatattcaaataatagttaatcgcaggtcgacattttggacatccacctttgtttttaaagtttaaaacatgtcgaacttctttagatgtttttaaacctttcgctcttatttgcgttacaatttgatcgcgtgtcaaatcagtgcaaccacatataccagcaggttttgcggcaacaaagtcatctcctaaagtgtgctgcaatatttgagcaatttgcggtttacatttaccacatgaattccccgcttttgttttagccgttacttcttcaactgttgtaaagccattttccgtaatcgcatttactatagtacctttatcaacaccattacaaccacaaattgtttcatcatcagccatatcagcaattgatagcgatgcctcttctccacctttagtaagcaatgatacaagtgtgtaatcttcagtggattcaccttttttcatcatgttataaaagcgtgaaccatcatcgatatcaccatatagtactgcaccaactacattaccgtcttttaaaaagatttttttatagttattatcaacactattaaatatttcaatacctttaatttctgcattttctacaatttgaccagcactatacaagtcacacccagaaacttttaatgacgtaaatgttgttgatcccttgtatccgttcgtttctttatttgttaaatgatcagctaatactttaccttgttcatatagtggtgcaacgagtccataaactttgccgttatgttctgcacattcaccaactgcatatacattgctatcacttgtttgcatcacatcattgacaacaatacctcgattaacatctagacctgattctttggctacttctgtgtatggtcgaatacctactgccataacaactaagtctgccggaatctcgcgtccatcagccaatttaacaccttcaacatcatcttcgcctaagatttcagttgtgttggcttgcatttcaaacttcataccttgcttttctagatctgctttaagcatatttccagctttacggtctagctgcatttccatcaaccattcagctaaatgtaacaccgttacttccataccttgatctaataaaccacgtgcacactctaaacctagtaagcctccaccaattacaattgctttctttttagtcttcgcaatgttcatcatttgttcagtatcatcaatcgttctccaaccaattacactcggtaatgtcgaacctggaactggaatgacgaatgctttagaacctgtcgcaaaaatcaatttatcgtatgatacttcaataccatttgcagtagtaactgattgatttgctctatctacttcaattacaggatcatttgtaattaactcgataccatgttcctcataccactcatatggattcataattgtttcttcaactgtcattttattttgtaaaatatttgaaagcatgatgcggttatagtttggataaggttctttaccaattaccgtaatatcatataaatcgttggcgcgctctaatatttcttcgattgttcgaatgcccgccataccgttaccaatcattactagtttttgctttgccataaaatatgcccctttactccataatatttatttcaaaaaaaggtattaatttttcgttagtgcttttatattttcattggaatcattaagctttctaatctatcgttaatgatttgctttaaaattgggtcgaagttaattgaaggtgtgaagtgtatatctgtattaataaccatgtcattcatttgctgcttcactttgttaacaagtcttccgtcatataaaaataatggtacgacaatcaatttttgataccgtttcgagatgctttctaaatcatgtgtaaaactaatctctccatatagcgttctcgcatatgtcggcttgctaatttgcaaattttgagcgcatatttgtaactcttcgtgtgccttagtaaactttccattaatattgccgtgtgcaacaaccataactccaacttgttgttcgtcacctgctaatgcgtcacaaatacgttgttcaattaatcgtctcattaaaggatgtgtgccaagtggatcgcttacttctacctttatgtctggataccgtcgtttcatttcatgaacgatattcggtatatccttgagataatgcattgcactaaagattagcaatggtacaattttaaaatggtcaaccccactttgaaccaacgtcgtcattaccgtctctaaatcctgatgctcactttctaaaaacgcaatatcatagtgatgtatatcatcttttattaattcagaaataaatgcttctaacgcttgattctgtcgtccgtgcctcatgccatgtgcaacaatgatattcccattcacatttaccaaccctttcacacgtattgtataccaaatcattttgtttttgtgaaaagaatcacattataatgtaaaatcagggaattccctgatgcctgtagtcatgcatattccttatacattttccctttttgttaaatcaaaaaaagcgaccgatatatgaatccctactcaacatttatttgagcaagcattaatatatcggtcgcttgtagtgtatattattatcttaaaatggtggttggcctaatattgtttcgtcaaagcgctcgggtatcaatactttgcgcatgatcacacctaaatcgccatcatcattttcatgttcgctgtatatttcataacctcttttttcataaattttaagtaaccacggatgcaatcttgcagatgtacctaaagtaactgccgctgactttaacgtatctcgcaaaaatgcttcttcaacataagtaagtaattggctaccatagcctttcccttcatactcaggatttgtcgcaaaccaccagacaaaaggataacccgaaatacttttcacacttccccaaggatatctaaccgtaatcgtagatataatttcatcatcaattgtcatgacaaatgtagtatttttatctatattttctttaacagcatctaaattagcattaaccgaaggccaatcaatacctagttctcttagaggcgtaaatgcttcatgcatgagttgttgcaatttttctgcatcttgttcacttgcgagtcgaatcatcgtttttgtcatattaatccccactcttttttaaatgatttaaccatattttatttttaaaataaatatccatcaaagtgtatcaataaatttatcacatgtcagaaagtatgcttcatctgaatacaccaatactctcatgaaacttattaaaaattactctctcaacgtaaaaaaaccattcaaattcatgaatggtttggaagaatgattcattgttacgctatttaatcactacatcttaattattgttgctctaaacgattacgcttaccatttaagaaagcataaacgagacctacaaaaataccgccaccgacaaagttacctaagaaagcaaaaacgatattttttaaaacgtgtaaccatgaaactgcatcaaggttaaagaataccatacctgcatatagacctgcattgaacacaacgtgctcatatcccatgtatacaaagaccacgacaccacaagctatgaagaatgcctttgttaagccgcctttgaattgcatagagatgaaaataccaatattaataaagaagttacagaaaataccttttgtaaaaatattcaaccatgttgaatcaacagtctttttctgaactaaagctgttaaagcttgtgtcatttcaggtgtcatgacatgcgcaaatttcattaagaaaaataacacaaacccacctaaaatatttcctaagaaacaatataataaaatccaagtcatcttcttaacagaaacgactttataataccagcctactgtaaagtacatgaagttacttgttaataattcagagttagttaatacaactaaaatcaaacctaaactaaacgcaatggctcccattaaattgataagtccatctacgtgagtactcgcaaactgcgtctttattccgaacataaatacagtaacgattgagagtaaaaatccggccatcattgctttaagcatatatcggccaggtgtttgctgtaccattacttgcttcatttgtactgaagatgatattgaatcaacaattgcgcctgttgaatatgtatcttcaactgttttcttattttctatcacagtacttcccccatttactttgatcaaataaaatttactttctaattatattagtaaatcaatgtaattgatagtttaaatttcagaaaaatctttttattctctcaaaaatgtagttttctttcataaaaacagcgagataaatcgcgtgattggctaatatctttatgatttaagatattacgacgctcattttatctcgctttatgtaaagtattacttattcttttttaaatttgaaaagtaatgtaaaccatatgcaaatacactgtagcctacgactgtacgcaaaataaatctaaccactttatttggtacacatttcgaagtaacagtaattgaagataaaagcgtagtaaaaatatataatattaatactttaatgtaacgttgtgccatcgaatcatccttcattcaattaataatattacgttattattataaactgaatggcatataaaattttttacatattttcaacaactttatttcaataaagcatcaagttgatctaaagtttgattcataccttgttcaacacccatgtttatgacttgttgagcggcttcttttgttggaaataccgatgttgatgtcactgtcgttttcgttgtattgctcttggaaaatgacaaagtaattttcatgcttggcatttttgtatcttttgcaccttgaggtgtcgcaaatgagtcaatatattcaattaaatatggacgcttaaccgttttatattctgctaatgtatagctggtcattgtaggtgttttaatcgcataaaatgcatcaccgcctgaaacagcattaaagcgaaacactttggtactagcgtcttttggatgaaaccatttttcaaataatgcttttgtcgtataggcatcaaacaccttttcaatcggtgcttctatcgttcttgaaaaaataattttattatcttcaactttaatcgtcatcttcccactccctatcttttatatttactcatcttaacatgcattgagtaacatatgttaccaaatcatttgttataaactatagtaatattaatcattccctctgttgaaattgataactacgaaataaaaaacacactctattcagctattaacagttgagtagagtgtgcaaacctgttgaattaatgcgctaacatttcttctttgatttggtctttatttaattttgaaggataatatgttggccagttatccatttcttttaataacgcgtcattatcattacccataaagatatggaagtgttctgcctttttaggtgcaatgttgtgatcgctaaattggatgaatttcggtaagtctttatcattaccatcgaccaatttaaacataaatctcacgccacggttacctttaggatatttcaatgttttcttaccattgtattcatatttaccagtgtgtttcttaccatctttagtaaatgtaatttcatttccttttatatcaatgttagtaatatcagttttatatcctttgtcataataagcttttaaatctttagcagatttcttaggatcattttcagctttatgttccatcacttcatcaagcgtaccgtcttttaagtaagggtaaacagattgccattcaccagcataatcgcttaattcacggtctttaacttgctcatctttaaaatacccatcagaaattgctttgtcatgtttactttcagctttgtcgtctttcactttaacaccactgtctaaagctttaccgatattttcaatattagatttcattaatgattgatacgtaatattatcttttttctgttgttctttatttaaagactccatgttgtagaattttaaaggcttcgcatctgtttctttacgaattgtttcagtcactttattcgcaacattatcttcgtaaagaatatatttagcattgctatctctaatttctttaacaattttagttaattctttttgtgatggatcttcagcattcatattttgaatacctttttgaacaaaaccataacgatcagctaagtatccaattgattcatgtgaaatgaatactgcattaccttgcttatcttttgtaacttgcttcatatcgttatcaattttcttaagatcgtcgtttaattttttgtagtttttctcatagtcatctttatgttttggatcttttttcactaattcatctttaatttctttagcgaaagtttggttaattttaggatctaaccatacgtgtggatcatatccaccatgatgatgatgatgttcttctttctcatgatcatgcccctcatgttcatgctcttcaccatgctcgtgttgatcagttaaaagctttgctttatctaatttatcctctaaagacagttttttatctttatctttgatagtagatgcaactttcttagcaaccggatctaaattatcccctgtatacataaacaagtctgacttgcttgcacttaatatatctttttgtgttggttcatagctatgtaaatctgtccctgctggatagattgatgataccttcacgtgttttccaccaatttgctctgcaaatgattgcaatggataaactgtcgttttaattgttaccttgccatctttatcttttccatcatcattcccacatgcggctaatgataaagttacggctggtacaagaagtaacatacctaatttctttttcatagtcaccctcctaaatagtaatctttacgttttaaaattatatactcatgctacttaaaatacaagcactgtttttataaataatataaagtcgaatcatactttaggtatttaccacttttcgttttatctaatacatgactattgtacaaatatgatacagaaaactttatagtatttacgaacgtcataatataagaaaaaagacaatctctatcatattgctaatagaaattgccttttcatattgtcctaaaataacttaccctatttttatagtgtgacttttagatttaataatggtatttacatgatgctatttttatatgattgtcatctactgtataaaccaatctatgttcgtgattgatacgtctactataatacccagtcagattcgattttaacttttcaggcttacctataccttccaatgcaccatttctgtcaatacttttaagtaactcattaatcttcttcaccatttttttatcgttctgctgaaaatacttataatcttcaaaggcttgaggcgaaaacgtaatatttaacctagccattatacatctatatctttcgttatagttttcccacgttctagatctgcaattgattgagctaagtgttcagcattatttgggttctgttggaggtaaagtgtttccatcatggagttataatctgattctgacatgattactacgtttttatcatcagtagatgttacagttaccatatcactatcatcatttacttttgtcataagtgcctttaaattctgtcgagcgtatgaataatttttaataatcatatttatcgcctccttttaacacacctcaattgtacaaatatctgtacaataaaacaagcgacacagaaaaaaactactaatcaagatttcgcacggggaagaatcaatacctatcctgtactgattccctactaaacaatgtttacatgataatttctacctatttagacttcatacattaaaaagacaatctctatcatatcgctaatagaaattgccttttcatattgtcctaataaattgatatcacttacttatctcaacaattaagattattttattttatcttttaataacttctcataactttcataatcatatggatcttcaactttctcgccattaataaatgcagttggtgtcgtttttatatgattatctttcgctatttttttatctttctctgcagctttccaagacttgctatcttttgtcttgtaatcttttataattttattttccgtctctttatctaaatgcagttgtttaatatgtttatctaatagttcttttgttaaccattctttattttcatcttgctgggcagcaaataattgcttttgaaaatctaaaaatgatttaggtgcatacatcaatactgcatgactcgcacgcgaaccaacaattgagtctttacctaagaaagctaaattgacaaattggtattccactttgtgattatctatataatttttacgcaactttggcatgactttttcatctaattctttacaaaaaggacatttatagtcgccatatatgacaactaatggtttgccgtttttcgaggatgtcgttgctgattcttttttaccgcaagctgttaaaattaacatgctcactataaataatgttagtaattttttagtcataataactcctgttcatatctagttcgtcatattttcttcatgataatccgcatcatgttgttgataatatcgtctcgaatcaaaatcttgcttatatgatacacgtttatcactaaaatcatatgcataataatgcacttcatcatcattactcaaaggtttataagctaaaatgataattttatccttatcatagacataaatattagcatctttgcgttcaaaatgatcaacacgatcaccgttgccttttttggcaagttgttcttgtttttgattttgaattttaactgcttcatctatttctttcacatatttatcattaccacatcctgatataaagactagtaataataataccgtcgccacaaatcgcttcaatgctcccactcctactatcaacttccaactaactttcaatataattaatactatacaccgtcaaacattaatgcgctacaactactaccaatgcatttaatataaatatccaaagaaataacagttatgtatagtcaaagaaaaatatatttcattttctatgtgtatttgtaatcagtttttgataaaataaaaaaatagcattattaataaattcaaaaattacagttcaattcagagagggatgggataaaatgaactttgtaacgttgacttcggatgagttcaatgcgtttacaacaaagcatttttcacattacacacaatcagctattcattacaatcatagagttgatttaaaaggcgatgtgcatcttgtaggggttaaagatgacaatggtcaagtgattgcaggatgcttattgacagaagcacgcacacttaaatttttcaaatatttttatacacatcgcgggccagtgatggattatacaaatcaatcattagtagcatttttctttaaagcattaacgtcatatttaaagaaacacaattgtttatatgtccttgtagatccatatttaattgaaaatttacgcaatgcagatggtgaaattgttaagtcttatgacaaccgagcatttgttagaacaatggacacattaggctataagcatcaaggttttccagtcggttatgattcaatgagtcaaatccgttggttatctgtattagatttaaaggataaaacagaagaccagttattaaaagaaatggattatcaaacgagacgtaatattaaaaaaacatatgatattggtgtcaaaactaaaacgttaacgattgatgaaacgcaaacttttttcgacttattccatatggctgaggaaaagcatggtttcaaattccgtgagttaccatactttgaagaaatgcaaaagttatacgatgaccacgccatgttaaagttggcgtatattgatttaaacgagtatttaaaaacgttacaattaaagcaacaacaattaacagctgaactctcaggtgttgaagaagcattgaaagaaagtcctaattcaaagaaaaataaaacgaaacgcacacagctagaacaacagctaaatagcaataagcgtaaaatcgacaatacaatagaacaaattgaacaagatggtgcagtcttaaacttagcttctgctttatttatctacaatgagcatgaagtttattacttatctagtggttcaaaccctaaatataatgcttatatgggtgcctaccatttgcagtgggaaatgattaagtttgctaaagcgcatcatattgatcgctataatttttatggtattaccggtgacttttcagagtcatcagaagactatggcgtccaacaattcaaaaaaggttttaacgcacatgtagaagagtatatcggtgactttattaagcctatcaaaccaatgttttacaaaattcagcagtatttaaatcataaacgtcgttaaaatatcgctccaagattatgacaacataacaaagaaccacgcatcatgtatatggcttcatcgccatactaaaacatgatacgtggttctatttgattattcttcatttataacatttaagaaacgtcttaattcttctgttttcggacgattgaacatctcttctggagccccttgttctccgatcatgccttcatgaataaatacaatgttattagatacttctttagcaaaacgcatttcatgtgtcacaatgaccattgtcatgccttcattagccaaatctttaataacctttaaaacatcattcacaagttcaggatcaagtgcagatgttggttcatcaaacaacatcactttagggttcattgctagtgctcttgcaatagcaacacgttgttgttgaccacctgataatgcatgtggacgttgatctttgacatgtgttaaaccaactttctcaagtaactcaagtgatttcccacgtgcctcatcctttttcaactttttaactgtgataagaccttccattacattttctaatgccgtcttatgcggaaaaaggttataactttgaaataccataccagactgtttacgaacttctatttgtgattttttatctttagatgtatatgttttgccgttaacataaactgtaccttcagttggaatttctaatgcattaatcatacgtaacaatgttgttttacctgaaccagatcgaccgattaaggttacaacctcaccttgttcaacagataaatcaatacctttgatgacttcaacatcattaaatgatttatggatattgttcaattgaatcatgagcgataccctctttcaatataagattcatagataccttggataattgaaataataaagcataccacccagtacattagcgcaactaacacataaattgttaaatattcatatgttgtagacgcaacttcttgagcttttctaaacatttcagccactaaaataaatcctaataatgatgtatctttgattaaacttaaaaatgtattacctagtgcaggaatcgacactcgaattgcctgcggtaaaatgatacgttgtatcgtttgaccatacgtcataccgatggaatatgcagcttctgtttgtcctttcggtatagaaataataccgccacgaataatttccgaagcatacgcacctacatttaatgataaaccaataatagcagccactacaggtgccaatgtccattggttgtcagcgtcatttgttaataatctacctaattctggaataccataaaatatgataaataattgtactatcattggtgttcctcgaataatagatacatagacacgtgaaatacttcttaaaattttactcgttgaaattcgcattaatgctgtaaataatgcaataatcaatcctaaaacaaatgtaactaatgtaataggaattgaatatttgaccaaaccttctagcataggtccgaaagcttgttttgcagcatctagcgcatgttgttgttcgctatttagatttagaaacatcttgaccaaaccatttcttacctattttagctaattcaccgttttcctcgatttttttcaagccatcattgaatttttgaactgtttcatcatctgcttttttagaaaatgcaaatgcagatctactttgttcagcattacctttgattgctttgatcttagcattaggtttttgttttttataatccaagtatgacagactatcattaaatgtaccatcaacacgcttagacaataataaatccattgattggttaaagccatcaacttttgtaatatcagcacctttatccttagctaatttaccataattagatgtgaatgtttgtgctaacttcttacctttaacatcatcaaaatctttaatatctttttcattttcacgaataactaaaacagcacttgagaatgtgtaaggcttagaaaatttatatttcttttctctatcaggatttatacccacttggttcgcgattacatcaaaacgtcctgcgtctaaacctgcaaacatagaatcccaagaagtttcattaaatttaagttttaaaccttcttctttagccactgctttaataacatcaatatcgtaaccagttaatttaccatctttatcatggaaactaaatggtgcataagtcccctcagtaccaacattaattgtcttgctatctttattagcttccttgtcttttgacgaattgtttccacatgcagccaatatgaaaacgaaagctatcatcacaaataaaagtcttttcatagaatatatctccttattcttattattctaatcggaataaaaatattttaatctgaaatgccggataagtcaatatgttgaacttttgctaaaaagctttatatagctagcaacttatatttattgacgagaatcaacttcttttttcttaccttgtaacataaatgaacaaaagaaactaacaactgtaatcaataatgcaaataaaaatccagcgtgataaccatgcaacatcgtatcaactttaatttgattcatcatatcaattttgttcatgccattatagtctgacatagttggagaaaagtttttgcttgcatgggataaaatagtaattaatgcagctgttccgatagaaccagcaatttgttgtactgtgtttgtcatagatgaaccatgtgcattcatttctggctttaattgattcatcgtatgggtcattactggaattaatcctaacgcgataccaaccattcgaatcgcataaactgttgccaacatgattgttgatgtttgttcatccattacaacaaaataagccgtagtaataacaacaatcgccatacctactaaagcaagctttctaggaccaaacttttcatataaagcacccgaagtcatcgacataaatgccataacaattgctcctggtaataaagttaacccagaatctaaagctgaacgatgcaataaattttgcacaaagataggtaaaatcgtttccgaaccaatcatcgataccattgtgacacccataataatgataccaactgtaaattgtttatttttaaatacagcaaaatttaataatggtgttgatagccgatattgacgtaatacaaataatgcgactaaaacaacgcctccaatcatagatactaatacgataggattatcaaaacctttttctgaaattgaactcgttccatacaataacccgccgaaacctagtacagaaaaaatgacagaaataaaatcaataggtactttaattgtagttccaacattttttatcgttttaaatccaattaaaaatgtcacagctgcaattggagcgacaacatggaaaagcgatctccagttaaaatattcaacaaggtaacctgaaagagtaggtccaatagctggtgctaaaccaattaccaaaccaaatatccccatatatttaccgcgttcatgcggttggaaaacatccaaaatcgttgtcatcatcaatggcatcataatacctgcgcctaacgcctgaataattctagcaactaataatgttgcaaagtgcggactcaagccgccgagtaatgtacctaagaaaaagatagaaatacccactaaaaacacttgtcttgttgtataacgttgtataacaagcgcggacaaaggaataacaatcccattagtcaataaaaaagctgttgtcaaccattgaacttgtgtatatgaaatttcaaaatctttcataatacttggtaaagccgtcactaatagtgtttcatttaataatccaaaaaatccacccatcagcatagtaataatcatcgttaatttttgtttcttcgacatttaaagcttccccctcaccatctaaaaaacaacactcatttttagatatccggtaattatacccattttcaaaaaaattagcacgactttattacaatttctttaaaacgtaatcattactatttacatatgagtagttatcggtcataatatatttacaaggagggatagagatgaaattagatttacagactgctcgtcgtaatttaaatagccctaacattaaaacaagaaagcgtgctttaaagattattaagcaacataaaagagcgaaataattgttttaatttgactatattgtatgtctaactatattttcgagtatccctagctcgttaatataaactctatacttaactatttccttacattacttcacatatttaagagctgcatatacactcactccttgtgtacatgcagctctttttttataagtagtatttatctataacttctaaatcatccgttaattcataaacaagcggtgcacctgttttaatttcataattaatgatatcttcatctgacacatcttcaagatatttaatcaatgcgcgaattgaatttccgtgtgcagaaactaataccgtttgaccatctagcaaatattgtgaaatatgatctgtccaaaatggtatcactcgaactaaagtatctttcagactttcagaataaggcatcatacgtttatctaaatgattatatcgacgatcagctaagtaagcttcacgttgttcttcggtttcagcaggtggtttcacatcataagaacgacgccaaatatgtacttgttcttctccaaattcttttctagcatcatctttatttaagccttgcaatccaccatagtggcgttcatttaaacgccagcttttatatacaggaatccattgttgtttagattcagttaaaatataatgcgttgtatctaaagcacgtgttaataacgatgtaaaagctacatcgatggcaatgttattttctcttactttttcacctgctctagtcgcttcattaataccttgttcagataaattaacatcttcccatccagtaaataagtttttagcattccactcgctttgtccatgacgacataaaattaattttggcataacttataacctctttcctttaatctttaggacgttatttcagggatattttaagatgatttaatcttagtaattttcttttcaatatattttaaaattcaatgattaaatcaattatcactagacattaaatacataaatcctattccccattttcattttttaattcataaatgaatcaataaccacctaataacaaatcatattatacacctttgttcgccatttttctaaggtttaaaaaatatttttaggtgcacctaaaaataaatgtaataaaaacgcctactcagatatttatatatctatgaagacgtttaaatacattatagatggtctggttctgggtgaacgtatactgaggaaataccttttttgtgcaaatgatgttcgacattgtcacaaatttgatgcgcttctactaaggaaaggttagcatctacaacaattgtgacatcaataaacacactacttccatggtaacgccctttaatacttttaacttcttgtacttcatcaacttctaaaatatcattgcgatacgcttctaattcagtttcattgaaaccatcactcaacataaaaattgcttctttaaaaataccaaaaccagtataaacgattagtaagcctagtaatgttgctaaaataatatcgacaattgggaaaccgatttgcgtaaaaattaatcctatcgctgttccaatgctgactaaactatctgataaattatctttggcagccgaatttaaagaactacttttcgttcttttcgctagtctttgattgactgcaaatacaatcaacattacaagaccactgattaagctgacgataattgttattgcgttaggtacaacgtcatcttctttgaacaaacgaggtgcattttgaataactacttggatacctacaaacataatgacaaatgacaccaataatgaagaaatattttcagacttcaaatggccataaggatgatttcgatctgcaggtttaattgaaattttcaatccaataataacagctaaagaaacgataatatctgtcatattgtttaatgcgtcggctcttacagctgcagagttaaagacaaaacccgtgacatacttaacaatagataagattatatatacaattaaactcaaataagcaccgcgttgcgccaatttaagattttcattatgagacatgcgttgaaccaccttgaattagtatagtaacaatattatgaatgatttattttaaatttacaacgtttttaatttttataaatttttataaaattaaactaatttattcattcgcaacccctaaaaatattttttagcctttctgcgaattttatgagctagaaaggcttatgcattagtagcgaagctatctaatgcgttcctttattttctgcgaattttatgagctagaaaggcacccaactctccctgtttgttaactttcgcctcgaaagtttctatgttagaaccctatgcatgagttgcgaagctatctaatgtgttcctttattttctgcgaattttatgagctagaaaggcgcccaactctccctgtttgttaactttcgcctcgaaagtttctatgttgggaccctatgcattagtagcgaagctatctaatgtcgtgacctaattatatagaagaaaaagtgcatcagtgacaaattaaatgagatttctactctaccaaactctcttcgaaagacaattttctcctctatttattagcaaactattgcatttctccatatagtacttccttacttaaaatacgctgaatgttctgaattaaacgcttttttacatagttaacactagttaatctattagttaacattagttaataattagttaatttccatttgtattctcatgtgataaattctaaaagcatacaataaatttaatatgtaaaaagaaagggaatacacatgaaaaataaatatatctcgaagttgctagttggggcagcaacaattactttagctacaatgatttcaaatggggaagcaaaagcgagtgaaaacacgcaacaaacttcaactaagcaccaaacaactcaaaacaactacgtaacagatcaacaaaaagctttttatcaagtattacatctaaaaggtatcacagaagaacaacgtaaccaatacatcaaaacattacgcgaacacccagaacgtgcacaagaagtattctctgaatcacttaaagacagcaagaacccagaccgacgtgttgcacaacaaaacgctttttacaatgttcttaaaaatgataacttaactgaacaagaaaaaaataattacattgcacaaattaaagaaaaccctgataaaagccaacaagtttgggtagaatcagtacaatcttctaaagctaaagaacgtcaaaatattgaaaatgcggataaagcaattaaagatttccaagataacaaagcaccacacgataaatcagcagcatatgaagctaactcaaaattacctaaagatttacgcgataaaaataaccgctttgtagaaaaagtttcaattgaaaaagcaatcgttcgtcatgatgagcgtgtgaaatcagcaaacgatgccattactaaattacaaaaaaatgattcaattgaaaacagacgtttagcacaacgtgaagttaataaagcacctatggatgtaaaagagcatttacagaaacaattagacgcattagtagctcaaaaagatgctgaaaagaaagtggcgccaaaagttgaggctcctcaaattcaatcaccacaaattgaaaaacctaaagcagaatcaccaaaagttgaagtccctcaaatccaatcaccaaaagttgaggttcctcaatctaaattattaggttactaccaatcattaaaagattcatttaactatggttacaagtatttaacagatacttataaaagctataaagaaaaatatgatacagcaaagtactacactgataaatattttaaatataaaggtacaatagataaaaccgtactatcagtttttggtaatggatacaaatcatacatccaaccattaaaagttgaagatcaaaaaaattatgtatctaaatcatatgcacaagtaagaaactatgtaactgaaactttaaacacaggtaaagtattatatgccttttatcaaaatccaaaagtagttaaagctgctataactacagctgaaactgcatcatcaatcaaaaatacattaagtaatttattatcattctggaaataatcaatcaaaagtatcttctctagttttacatcattttttaaataattttcgtaataaaccgtgattaaaaagaaccgttgattctcaatcgaatctgcggttctttttcattttccatcaattaaatgtttcttcgctacttgtcagcccacttttttacctgcaacttgttaaataatccttacatcgttaacgaatagttcatcatttagttgaatcagctcaactttattaacttcaaattttcacaaactattgcgcaatccattcctcttccactacaagcaccataattaaacaacaattcaatagaataagacttgcaaaacatagttatgtagctatataaacgcctgcgaccaataaatcttttaaacataacataatgcaaaaacatcatttaacaatgctaaaaatgtctcttcaatacatgttgatagtaattaacttttaacgaacagttaattcgaaaacgcttacaaatagattattatatatatgaacttaaaattaaatagaaagaaagtgatttctatgattaaaaataaaatattaacagcaactttagcagttggtttaatagcccctttagccaatccatttatagaaatttctaaagcagaaaataagatagaagatatcggtcaaggtgcagaaatcatcaaaagaacacaagacattactagcaaacgattagctataactcaaaacattcaatttgattttgtaaaagataaaaaatataacaaagatgccctagttgttaagatgcaaggcttcatcagctctagaacaacatattcagacttaaaaaaatatccatatattaaaagaatgatatggccatttcaatataatatcagtttgaaaacgaaagactctaatgttgatttaatcaattatcttcctaaaaataaaattgattcagcagatgttagtcagaaattaggctataatatcggcggaaacttccaatcagcgccatcaatcggaggcagtggctcattcaactactctaaaacaattagttataatcaaaaaaactatgttactgaagtagaaagtcagaactctaaaggtgttaaatggggagtgaaagcaaattcattcgttacaccgaatggtcaagtatctgcatatgatcaatacttatttgcacaagacccaactggtccagcagcaagagactatttcgtcccagataatcaactacctcctttaattcaaagtggctttaatccatcatttattacaacattgtcacacgaaagaggtaaaggtgataaaagcgagtttgaaatcacttacggcagaaacatggatgctacatatgcttacgtgacaagacatcgtttagccgttgatagaaaacatgatgcttttaaaaaccgaaacgttacagttaaatatgaagtgaactggaaaacacatgaagtaaaaattaaaagcattacacctaagtaaacagttcaatcatcttaaaaaatcctgggacacttcatacttgtctcaggattttttaacaaattgaatcagcctcataacattaaattattttatcgtacattaaatttaataataacaactgatttttataagaataaagtatcgaaccagagtagatacacaaataatacaaatgaaacaatttaagttgaaagcttaaataaatattctcaagttaataaataattaacttttagatggattcatcaaaaatcgtaaaaagaacaatttgtattttacaaacattaattaaaaataaaagcaagacattcgtgcaatcggttaccttaaattgtttacaactgtcaacaataccaaggttttattaactatatttctcacaaaattagcttttagcattccaaacaaaaaaggttaaattgaacggaattatggcattttcaacttaattgtaaaaaaaattgataatggtcaattgttaatgaacagttaattataataacatccaaaatatattattatttaattaagttaaataaaattatagaaagaaagtgaaacttatgcttaaaaataaaatattagctacaactttatctgtgagcttacttgcccctcttgccaatccgttattagaaaatgctaaagctgccaacgatactgaagacatcggtaaaggaagcgatatagaaattatcaaaaggacagaagataaaacaagtaataaatggggcgtgactcaaaatattcaatttgattttgtgaaggataaaaaatataacaaagatgctttgatattaaagatgcaaggattcattagctctagaacaacatattacaactataaaaaaactaatcatgttaaagctatgcgatggccattccaatataatattggtttaaaaacaaatgataaatatgtttctttaattaattatttacctaaaaataaaattgaatctacaaacgtgagtcagacattaggatacaatatcggtggtaatttccaatcagccccatcactcggtggtaatggatcatttaactattctaaatcgattagctatacacaacaaaattatgtaagtgaagtagaacaacaaaactcaaaaagtgttttatggggcgtcaaagcgaattcattcgccactgaatcaggtcaaaaatcagcatttgatagcgatttatttgtaggctacaaacctcatagtaaagatcctagagattatttcgttccagacagtgagttacctcctcttgtacaaagtggatttaacccttcatttatcgccacagtatctcatgaaaaaggttcaagcgatacaagcgaatttgaaattacttacggaagaaacatggatgtcactcatgccattaaaagatcaacgcattatggcaacagttatttagacggacatagagtccataatgcatttgtaaatagaaactatactgtgaaatacgaggtcaattggaagactcatgaaatcaaggtgaaaggacagaattgatatgaaaatgaataaattagtcaaatcatccgttgctacatctatggcattattattactttctggtactgctaatgctgaaggtaaaataacaccagtcagcgtaaaaaaagtcgatgacaaagttactttatacaaaacaacagccacagcagattctgataaatttaaaatttcacagattttaacatttaatttcatcaaagataaaagttatgataaagatactttagtacttaaagctactgggaatattaactcaggctttgtgaaacctaatcctaatgactatgacttttcaaaattatattggggagctaaatacaatgtatctataagctcacaatctaatgattcagtaaacgtcgttgattatgcaccaaaaaatcaaaatgaagagtttcaagttcaaaatactttaggctatacatttggtggtgacattagtatctctaatggtttatctggtggacttaatggaaatacagctttttctgaaacaattaattataaacaagaaagttacagaacaacattaagtcgcaacacaaattataaaaatgttggctggggagttgaagcacataaaattatgaataatggttggggaccttatggacgagatagcttccacccaacatatggtaatgaactcttcttagctggcagacaaagcagtgcatacgctggccaaaacttcatagcgcaacaccaaatgccattattatctagaagtaacttcaatccagaatttttaagcgtactatcacacagacaagatggcgctaaaaaatctaaaattacagtaacttatcaacgtgaaatggatttataccaaattcgttggaatggcttctactgggcaggcgcaaattataaaaactttaaaactagaacatttaaatcaacatatgaaattgattgggaaaatcacaaagtgaaattgttagatacaaaagaaactgaaaacaataaatagctagtaaaacacggtcgccaacagtaattgtgacgaccgtgttttgatttattatcttagtaagactgccattctttttctcattgtgagatataaaggaatagctacaattaaagtgaatattacgcctggaatcgcgtttaacaacactacccacacaggtaaatttaaaataatagataatagtagcctagataccaaactgcctaatacacttgctaaaactaatgatagtacatttattttcaataaataaacaactgcaatagctataactctaaatataatagaaataatcacattaattggattaaatacgccaaatatcagcaataataagcttgataaaagcccacctaaaaagtactttttaattccaaagaaagctaatattaataatgctgccggtgcagataattgaaaatctaatcctggtataatggacggtattttcaaaactgccaaaatggttaaaatcgcagcaatgacactaatttgagtaatatcttttgatgtcatactaaaacccctataccgtttcataaacaacttgcttcggtgtgctttctaaaaatgatatgtaatgatttaaatcaatacgattgtccacaaatattattctgcctccatatctcgtattaactggtttaatatcaaacaatcgatggtaaccaattttagcagaggcaaaataacctgtcgtatacgttaagtcatcggacacgcaaagttctcctttgacatacggatgcgcattgatacaactagcaattgctaaggcatcagtcactctttcattaagatcacctttattatttatatcttcaaacgaaaaatgtgttgccctaatccccctttgtccaaatgaatctaaacgtttaccagatatagcagatagaataatagctcctgtataaaccgtttcatttttaatatatgtcatcccttgatttagcgcttgttcagtgacaccacattcttgtgttaaatgttggagatttgctttatcatcctcaataatttgtaatgcttttatttgttgaatcggttccatgattttttgtatttttatattgagaaaatccggttgcccattttcatgaaaaaaacctttattataaaacctttgtaccgtctgttctattttgtcaaactcacaaatcgtttcagcaccactaatatgaacatcttgattgctagaacgcatttttatactatacatgacgatcacctcaatcttcttgatgcaaaatttcaaacaacctatctatatcttgttcagtatgaaaatacgacaatgatattcttaacattggcttagtcacagttggataccttaaataacttgtaaacacatgatgctttaataatgtttgatgaatgttctcagccgcttctatgtcatcaaactcaataaacttaatcggcgagtttgaactattataattaacattgagtgcttttaacttttggttaaaatatttactcaaactatttaatttagtgcgtctatcatcagcatttattaacttttcaatgtttctttttataaaatacaaattataaattggcaaactacttgagtagatgagtggtctaccgtgattaattaacatatccttcacatcatttgaacttaaaatcacacccccgtatgcaccacatgctttagataaactagaagtgagtatatctatgccttgataattcgagtaattctctattccaaaactatgtgaaacatcgagtatcagtgttgcgttatatttatgctttaatgagactaattgaccaatatccacaacgtcgccattcgttgaaaatacactatcagatatgattattttttgtatattttgattagggtattccgctaaccttttttctaaatcagcaatatctaaatgcttatatatcactttttctaaaccacttaacttaataccgtcaataatactcgcatgattttcttgatctgaaaacacgacacaatttgtatttttgaaaatattaaataacgccaaattagcatcataaccactatttaagatagtacatgcactatatccgagccaacctgctaacattgtttcaatttcttcataagctgtcgaacttccactaattaatcttgaacttgataagtgataactatacttccgcataaatctttcgaaatcatccttatcaaacgctatttgacctaatcctaaataatcattagatgtatagttcgtacatctcttattttctacttcaatatactgtctatctatataccctaccgatttaagcgaccgatataaccctttctgttgtaataaatcaatttgctcttgaaacatcattcttgttttccttattttcacaagtgtcataatcaatttcaaagcccaaatcattaatcatatcgtagtctaattggttcggttgcccaccagtaattagataatcaccgacaaatattgaattcgccgcttttaatgctaatggctgtaacgaacgtaagttgacctctcttcctccagcaatacgaatttctttcgtaggattgattaatcggaataatgctacgattcttaaacatttcattggtgttaaatcatccatgcttccaaactttgtgcctttgattggatgcaaaaaattaatcggaatactgtcggcatccatttctttcaaagcaaatgccatatcaacaatatcttgattagattctcccataccacaaatcacgccagaacatggtgatatattattcgctttcattagttctatcgtatctgttctatctttataactatgcgttgtcacgacgttatcatggtaattttcacttgtattaatattgtggttatatctgtctacaccagctgacttaagtttcttagcttgttcgtcattcgttaatcctaaacatgcacagatttttagttgcgggtgttgagatttaatcgttcttacagtattactaatatgatcaacttctttatcgctcggtcctctaccactcataacaatacaatatgttccaatatgattatcatgtgccacctttgctccatcgataatttgttcctctggaattaaagcatatcgctgtttttgtttaatatctcgtgattgtccacagtacccacaattctcaggacatataccacttttagcatttaaaatcatgtttaattttacttttttaccgaaataatgttttcttaaaatgtacgcctcatttaataaatctaaggtatcaatattagtatcctcataaattttcaatacagtctcttttgttaattgttccccttgtaatatgcgtttagccaaattcatattaacacttcctatctaaaatgttatgtactgcctttttaaaaatacgtaccatcgttttcacttctttatttgacatacttaacactggcacaaacgtaatgacattttctaaatttctaatcattagcccgttttctttacatttacgtacaatacgttcaactttttcaatttctaacggcgttttactatctttatctgtaactaattcaactccaaacattaagcctcgtcctcttacatcaccaacatttcgatgacgcttcagcgcatgcaactgtttctcaagtgttgatgatgtcgattcaatatgtgacaataacttacgtttttcataaagtcttatattttctaatgcaaccgtacaaacgatttgattcccggtgtatgtatgaccatggaaaaaggtattcacaccatgcgaatcacttaaaaatgcattgtatattttttgagatgtcaatgtagctgcaagtggtaagtagccacctgtaatcgccttacctaaacacataatatccggttgaacatcttcatgattgcatgcaaacatctttccagttctcccaaaaccaactgctacctcatcacaaattaataagacatcgtattttttgcacaatttctcgacttctttcaaaaagcctttaggatgaacaaacaagcctgtcgcaccttgaatcaacggttccaatataaaccctgcgatttcatcatttctttcaattagaatttgctctatattcgttaaaatagctgtcatcatttcattttcagtatcgtaattactgcgataaaaagatgggctttctacttgaatattctcaaatattaagtctttaaatattttatgaaaggtcttgataccaccaacacttaccgcaccaatcgtatccccatgatagccgtgatttagcgttataaacttgtttttcttggcatatttttctctatcaatatttttccaatactgatatgccatctttattgcgatttcaacagacgcactgcctgtatcagaataaaatacttttcttagattacttggcgtgatttcgattaatttttccgcaagttctattgacggaatatttgatgatcctagcagcgtagaatgggcaattttattgagttgctttttaattaccttattcaagtatttgttattatgaccatgcacattgacccacaacgatgcataaccatctaaatatttattgccattcgtatcgtaaaggtaactaccctttcctttttcaatgatgattgcttcttctttgctatatacacccatttgtgtaaatggatgccaaacatattctgagtctttttgtttaagttgttgtgtgtaattcatttttaactcctattaattgttttaaaaatgcttctgagaaattttcatacgtggcatgttcttcaaatgtatagactgttttatttgttaattttccaatcgtaatttgattgtctttttcaatatagctgtctgtatagcgattcattattaaaaaattactcgccgatacattctgattaacataatcttggtgaacaatggcatcgctaatagcacctaattttgatggcaacacactgatgacacaatctgcacaatcattgattagatctttagtcatgtagaaatcatctgtaccttcatatattggtacggcaattcccccagcaccctcaattaagataaaatcaaattccttatctaaaacttttaccttatctaatacacgctgcttatttagaaaaatttgatctgtcattttaaatgcaaggtgtggtgatacaggttgcttaaaagtataaagtgacgttatgtcatagcttaaatcacattcatttttaaatacttctaaatctggaaacgtcccgtcttggcgttcctcagtttgaaatggtttaaaaatacaaactcgatgaccacgtgttttcaaagcatggtataaatgctttgtaacataggttttgcctacatcagtattcgtacttgtaataaaaatcctcataaaaaataagcacctcaatccgaatgtaaacttttataattaataagtttacatttaaggcgcatgtttttcaagaaaacatgaatttaaacttctcagtataactataaattttggcaaaattttgaccttgctattgaaatgactaagacttcttaaggaattcaggcagatataaacagcgattcgataaaatatgtcagttaaaattaataattgcattatttcttaataaaaagacatcctagctttaccatcttgtgaaacaatccattaattgtaatattacgttgagcgccttgttcatcaatgctataattagttacataataaattgaacatctaaatacaccaaatcccctcactattgccctagtgaggggatttattttgctgttgattatctatcaccctttttatttccaaattctgattccatattaaactattatttataatttccagcctgctgatttactttttattcttataaagtcttgatacattcctggttttcgaattaattcatcatgactacctttttgaattatttcaccttcattgagcactataatctgatctgcatttttaatagtttcaagtttatgtgcaattgtaattactgttttgcctttacttaattcattaattgccgtttgaatcagctgttcattttcagggtcaatacttgcagttgcttcatctaaaataattattggtgcatcttttaatatcgccctagcaatagaaatcctttgcttttctccgccagataaattactacctttttcatttagcattgtttgatatccctcaggtaatgacatgatgaagtcgtggcaacatgcttgcttcgctgcacgaataatttcttctttcgttgcacctggattgccaaacaatatgttattttcaatcgtatcattaaataaatacaccttttgaaatactgcactaattttcgacattaacgtacttaatgtcatatctttaatatcaacaccatcgatgcgaatatttccatcatcgatatcataaaagcgcaagagtaagtgacacaatgtagatttcccacttcctgaaggtccaattattgctgttgatgtttgtgtaggtatctcaaaattcacattctttatcacttgtttatcatcatatgaaaaattcacgttttgaaaagcgatattttcatttttaatcgtcaaattttttccattctcatccagttctggagcattttttatcttttcaatatcatctatcgtcatatctatcatttcaagtacgtgtgcagcactattaatattttcaacactatcaaatatcacaaatgaaaaaattgaaatcataataagggtaggtaaatcaatactatgattcatatataataagcatgcaactaatacaatcattattgaaacaacttttaaactaagtaaatgcaataaattgaatgggatatattgcatttctatttttgtatttatacgtttactttcattgactgcttggttaaaacttttaagactcgtattttctttcgcgaatgattttattacttgaataccacgaataacctccaataccttttccactaattggttttgtacattatgatacgctggcgcattttgtcgactctttctttctaataattgaatcgcaaaaaatgatagtaatacgccaatgcatgctaataatgatacttgccacgaaactacaagtagagacaatatgagtactgtaattaatatgtatccattaacaacaacgtccaccattttcatagcaaagttttctaaaaaggttaaatctgttgttactattgttgttaactcatttgaatgatgcgaattaaaataacctaaccttacatttttcaatttatcccctatatctaaacgttctttcgcactcatttcataagcgatgctctcatggcttttgcttttgaaatatgctgtaataaatcgtccaatcactaataaaaccatgataattacaacattcaatatatctttcatataaataggtttatgagatagcacattattaaatatttttgcagctaaaaagataggtaacgcaataaaaatagcatttaaaaatgacatgctaaatcctaaaatcattcttgctttatatggtcttatccagtttaaaattttaaatgtaatttgaaacatatttgacctccttttctcattagtttaattatgtccagtattgattccccaatcttttgtatgcatgtgcgtatcccacattttcttataattaccgtttaattttagcaataagtgatgtgaccctttttctaaaatttgttgtttacctaaaacaataatttgatctgcatgttgaatcgtagataaccgatgtgcaataacaatcaatgttttatcctgcgtcaacacatttaatgcttcttgaattttttgttcgttgtctggatcaacgtaagcagtcgcttcatctaatacaatgataggcgcatcttttaatatcattcttgcaatagtgactcgttgtttttcaccaccagacaattcatctcccactgtaccaacattcgtatcatatccatctggcaacttttcaataaattcatgacattgtgctaacttggcagctttttcaactgcctcatccgtagcttctggattgccaagtttaatattttctttaaaagtaagatttaataaaaagttatcttgtccaacaaaaccaactaaatcgttaagttgtttcgattcaatatcttttatatttataccgccaatcgtaatttcacctgaagtcacatcccagtatcgtgatataagcttggcaatggttgacttaccgctaccagatgccccgacgatagctgtgaaattattttctggtactgtaaatgataaatgcttaaagaccagatcgtccttatctttgttatatgaaaatccaacattattaaaagcaatttcataatgttgaggcttcttaaattttgttgacaatactaactcttctagacttaatatttgattcacttcagttaatgcgtattgtatagactttaaatgatttacataattagtaaaattcttaatcggtgctactacacctaaagataatacgatgcataggaaaaattccgcatagtttaattggttgatagatatcaaatacatgccgaccggtaaaatccctaaaaatgttgaaggtaatacactagctcctaaattcatatacacccatgtatttttaaaccaattcaaagtgtgaatcttataattatctactgcatctttatattttttatatgaactttgagattgattaaatgttttaattacctcaatgccttcgataaactctacaatcgcgctattcatataattattcgatttcatttgttcagcatatgtctcattaaatccagacataacttttttaaaagcgaaaattgaaattggtatcgttactaataaggcactagccatacgccaatcaatgagcattatgtataaaaagatagcagctgacaaaagtaagtttcctataacttcaggaatcatatgtgctaaaggtaattctattgtttcaaccttatcgacaaatatattttttaattcacctattttcttagattccactacgcctaaagggagacgcattaatttttgagctaattttttacgaatttcagataaaatttcatatgccgtaatatgtgatagcatcgttgacgctccaaaacaacacacttgtgaaatataagcgattaaagcaataaagatataaaccataatcgaattaatcgtatatgcattgttaatcatcattaaaataattttaaagactgcccaatatggaactaatccagaaaagacactgatgatagacaacaaaattgataacataattttccatttactatcagaagcaaatccgctgagtatctttatccaatttgtctgattgttcatcgtatatgtaactcctttcaattaataatctaaattaagccgcttatattatttatttcactggatgatatacataatataaatttgttatttgttaaaaattaatacttattacaagtacatcatatattagttgataacgattatcaatgtcgcgtggatttgtgacacatttcttttaaaaattcacaaggttatgggtcagaaatgataaagagccactaatgatttattatgtagtggttctttatccttagccacagctaatatgtacttaaaaataggaatacatgagtaaaactctatgttgggactccgccaacttgcattgtctctagaaattgggaatccaatttctctttgttgggtccctgagtatagccttgtagagtctagtacattgatttgtatcccaatgtccctataattgattattcgctttatctaatgatcctatgactcaactattaaatcatttttcgaaatacttaattctaatataattaaattcatttattgtaatattgcaaaaatacattgcacaccttgttcatcaatgctataattaattacataataaattgaacatctaaatacaccaaatcccctcactactgccatagtgaggggatttatttaggtgttggttatttgtcaccttttttattgttgcgcgttcgtaaccaatgtgcaaaaaacgcaacaagacagccgcttatagctgaagtcatgatgttaattaataaattgaacatccgtcatacacctcctctctgcgttaaagtaacgcccgagatgttaggcgaccatcatattatatcatttatttattatatttcacgcaatattaaggcttaagtaaagtattttttagtggtttacgctactttaattgctatcttttaaaatccatttagataatataaatgtgatgggtatcgtaataattaaaccagcaaatggtgcaatttctgctggcaaatttagccaggatacaaatacatataataaaactgtttgtaagcttacgttgacaatctgcgtaattggaaaactaatgaattttctccaagtaggttttaccctgtaaacaaaataacaattcaaataatatgaaatcacaaaagcgactagaaatccggtaatatgactaatcatatattcaatgtgtaataattttaacagcaataaatagacaacataataattcaacgtattaataccgccaacaatgataaattttaaaatttcagcatgcgtttgtgttagtttcatatgtgtaactcctcaacatcaaaatatatgcataactacgttctcgaaattgcgtgccaatccgcttcacttcaaatatgcttatttcaatctttataccctttcacagcaaatttagtctctttcccctcatccttatacgccattataatgtaactgatttatcgcgtgactcattagcactatagagattactttagttcactagtaattttatatacaataagagcgacaacagtaatgagaggatgtctactatgcaattacaaaaaattgtcatcgctcctgactcatttaaggaaagtatgaccgcacagcaagttggcaatattataaaacaggcatttactaatgtttatgggaatacccttcattatgatatcattccgatggctgatggtggtgaaggtaccacagatgctttaatgcatgcaacaggtgccactaagtatacagtcatcgttaatgaccctttaatgcgacctattgaagcatgttatgcacgcgcagacgaacaacaaattgcaattattgaaatggcggcagcgtcaggtttggatttattagaaaaagaggaacgtaatcctttatacacatcatcatatggtaccggtgaactaattaaagatgcattaaatcatggtgctaagaccattattttagggattggtggcagtgcaacaaatgacggtggtacaggtatgctaagtgcactaggcgtaaagtttactgatgtaaacggggacttattacaaatgaatggtgctaatcttgctcacattgcacaaatcgatataaccaatctagattcgcgattaaaagaggtgacctttaaagtggcctgtgatgtttcaaatcctttattgggtgaaaatggtgctacctatatttatggtcctcaaaaaggcgctgatgcaaagatgataccaaagttggatttcgcaatgtcgcattatcatgataagataaaaatgtgcacaggaaagtccgttaatcaaataccaggttctggtgcagctggcggtatgggcgcagcattattagcgttttgtgagacaactttaacaaaaggtattgatgtcgtctttgacattacagattttcatcaaagaattaaagatgcagacctcgttattactggagaaggacgcatggattatcagaccatctttggtaaaacacccgtaggcgttgcgttagctgcaaaacaatatcatattcctgtcatcgcgatttgtggcagtctaggcgaaaattatcaacatgtttacgatttcggtattgatagtgcctattctataatctcttcacctagcactttagaagatgtcctacaaaatagcgaacaaaatttattaaacactgcaactgacattgctcgtattttgaaattacaataatgtcaaagtaaatcatcagctttattatttgcagttaaaacttgaatgaggtgaaacccatgaaaagaactgataaataccgtgattcatatcaatacgacaatcaaaaccaaaatcatcgtcgtcaatctgaagacgcatcgtatagacaacaatatgctaaaggcgatcctgaagaacacccggaacgatactataatggtagagattatcgaagagaacaaattcttgaagaagaaaacgagaaatcccgccgttcaaaaaaatggttatatatcattattgccattctcttaattattgtcgctatttttgtcacacgcgccttacttaacaatgatagcgataaagttagtaatgaccctaaagtctctcaaaattataaaaaacaagttgaaaatcaagacggccaaattaaccagcaagttgataatgctaaagaaaatattaaaaacaaccaaaaaactgatgacattattaaaaatttacaaaatcaaatcgacaacttgaagcagcaagaacaaaacaaagctgattctaagctaactcaattttatcaagaccaaatcaacaaattgacagaggcaaataatgcacttaaaaacaatgcaagccaaggtaaaattgaaagcatgttaaatgatattaatacaaaattcgacagtattaaatctaaattagaaagcttatttaaagatgacaatggtggcgctaattaattattacacctgctttgatgataaacattaattccctatactttatctgtatcactacgttattcgtgatgatgcattaagagtatagggattttttatataaacttgtattctaactacatacaaatacacacaaaacgtatataatttatataattatatcatttaaaggagtctgatcatgcaatcaacgaaaaccaaaacgaagcatttttcatttttattgctaattacgttaggcgtcatgaccgcttttggcccactaactatagatatgtacgtaccatcattacctaaagtgcaaggtgattttggttctactacatcagaaattcaattaacattatcattcacaatgattggtcttgcactaggccaatttatctttggacctttatccgatgcttttggtcgcaaacggattgctgtatccattttgatcattttcattttggtatcaggtttgtctatgtttgttgatcaattgccattattcttaactttacgatttattcaaggtttaactggtggtggcgtcatcgtgattgccaaagcctctgctggtgataaatttagtggcaacgcactcgctaaatttttagcatctttaatggtagtaaatggcatcatcactattcttgcaccattagctggtggattagctttatccgtagcaacatggcgttctattttcacaattttaactattgtggcactcatcattttaattggcgtcgcttctcaattacctaaaacatctaaagatgaattaaagcaggtgaattttagtagcgtcattaaagactttggaagtctattgaaaaaaccagcgtttattattccaatgctattacaaggtttaacttatgtaatgctatttagttattcatctgcatcgccatttattactcaaaaattgtataatatgacaccccaacaatttagtatcatgtttgctgttaacggtgtaggtttaatcattgtcagtcaagtcgttgctttattagtagaaaaattacatcgccacatattattaatcattttaactattatacaagtggtaggtgttgctttaattatcctgacacttacattccatttaccactttgggtcttactcatcgcattcttcttaaatgtgtgtcctgtgacgtcaattggaccgcttggtttcacaatggctatggaagaacgaacaggtggcagtggtaacgcatcaagtttacttggcttattccaatttatcttaggtggcgctgttgcaccattagttggcttaaaaggcgaatttaatacatcaccatatatgattattatcttcattacagccattctattagtcagtctacaaatcatttactttaaaatgattaaaaagcaacatgtcgcataacacttcaacataattagaaccctagcaaagatatctatctttgtcagggttcttctttatgaattatgagatcgaatcttcaactaaaattacgccttcatatcaaggacatttctattcaatcaccctttaacaggcatccaaatttctgtaatatatttttcacttgtagtatcaccatcctgatacaactcaaaaaatggtgctgattttaccgtatctgcttgatattgatgtatgtagtgatgcacctcttccattttttgttgaactgctttaggtactgcgccctgtgcttcaaataccatatactttgaacttgctaatgttatgacatcatatttttcaatatcagcactattatctccggtaactgcaatcatatatgacatcttaccgtctaattcaggtatacataagccaagtatcccggctaaatcaccattattttttaactgtaaatccgcaattactccctcttgataacatctttgccaaaacccggctatatgttgctgagcctgtcgtccattttcatacgtttctttaatacctactaacgttaacgacgcaagttgttgtaattgatattccattttatcactccattaattttattcactcatgtaaaacatatgtttaggacattttgcattgacgctatataattatattaaatatttattgaatcaatgcgaggactatattatgaaccgaaaaatattaccagttaaacctatcagtcagctatttcctatccctatggtcatggggtgtgaaggtgtttccgcagccatgatgttgcaatacaataaccaacatatccctgctacagaaattatgagacattggccgacacatccgaacaatccacataaaggttatgttggacatcacttatttattaagcttggcaattatcatcaaacgatatttccagaagcatatgtaccatttttacaaaaatacaatcctaatatcgtagacggcactggtaaatccttagaagatcttaaaggtattatcgatcaaggtcaacctgtgttaatataccatactaatcttggctctaaaccattactacgtgttttccgctttgataacaagccagcgaaacaagtttcaaatattcacgtaacgttactcattgggtacgatgattactattactattatatcgatccactttggagtcatattcgtcgtggcctagttttacctgccatcattccaaatcgcaaacaaattattaaaattcgtaaagagaaaatggaatacagctttaattcaccaggaagaaagtgcatttatgtgcaaccacattcatatacaattgaaaatcaacaacaaaataaacacacgtaagtaaacacattactcgcgtgtgtaaaacataaaatgcgcaaactgggtcaggtttgcgcattttaaatttctattatttgtatcgtctcatttatttcctggtaaatatcttctgaacgccattgtcttggatagcctagacacggacagagataacatctgccatcatctatcacacttttacgaaaatgaacatggcccataatactatatggtatatcgaacatcgcatacaaaggattgaaatcacttgtcccaataaatgcattataaaaatcgaatatacgatgtggcataggaacaatgaaatcagggtgcgtcacaacatgtgtgactaaaatcactcgtctatttcctacttctaatatatctttcttcacttgttcagccgctattttagataaattttgatctgatatgccccaagatattcgttctttatcttgccaagtcgcaccataatgttttcctttttgtaaatgttctaatgaaaatcgttgtgctgcaaagctataatcataccaacctgtatgtcctattattgcccattcttcatttactataaatggttttcctaccaagcactgtgacatgctcttataattattccaaatgtcttgcgtagtcatactttcaacttcccataaatcatggtttccaggaacaaatttcacaggtatatctaattgttttgtcaattgcgttataaattggtgcgtcaattgataatgatttgagatatctcccgcaatcaacaatatatccaatttcttatacttaactatttcaaccaatgcctctaagtaatcttcggatgtttttttattatgacgatcaatatgtaaatcggcgattgtccctatcttcatacccataccttctttactcaaattaaaatgttatttattatgccatagcttatctaatatatatagttaactgcttcatttagatgattattttatatttttgcataaaaacttatatcttttcaaaaaatcgataagttttagttatcatacccttacctatcaaatgttttttcttatatttaaaaaaataattgctttattaaatggatttctttagtatttataattaagaaaacgcttacacacaacttttttatttgctttatcctgaggaggaaaattatggcaagaaaattgcatagagagttgaataacagacacatccaattgatagcaattgggggcgcaattggaactgggttattcctaggatcaggtcaaacaatatctttaactggtccatcactgttattcacatacatgattattggggttgtactattcgcttttatgcgcgcattaggcgaattgttgttgagcaatacaagatttaattcatttgttgatattgcaaatgaatatttaggcccttttggtggctttgtcattggctggacttactggttatgttggattgtatcaagtatgtcagacctaactgcgatgggacaatactttgcattttggtatccacaagtcccaaattggattaccgtgctatttattgttttaatcttgattagcttcaacttattaggtgccagattatttggtgaactggagttttggttctctattattaaagttgtcacaattattgcgatggttatcgttggtcttgtattaatctttttctcatttaaaacacattatggacatgcatcattcacaaacttaatcagtcacggtggcatgttccctggtggaacatttggtttcttaatgtcattccaaattgctgtatattcattcattggtattgaacttataggtgtaactgctggtgaaacgaaagatcctgaaaaaaccttaccgaaagcaattaataatgtacctatccgtattttattattctatatcggtggtctattagtaattatgtcagtcataccttggaatgatatcgatccaaatagtagccctttcgttaaactctttacattaatcggcgtgccatttgcagcaggtgtcgttaactttgtcgtgctaactgccgcggcctctgctacaaatagtggtatctattcgaatagtcgtatcttattcggactgtcacaacaagggttaggtcctaaagttttaaataaaacgaatagtcatggcgtgccttatttatcaatgttagtttcatcaattgcattacttatagcagccttgttaaactacattttccctaatgcaattcaactattcatatacgttacaacgttatcaactgtgttgtttttagttgtttgggcaatgattattgtcgcttatctaatgtatttgaaaaagcatcctgaggcacataaaaacagtaaatttaagttgattggtggtaagcctattgcttacattattctagcgttcttcttctttgtattcattttattattctttagtgacgaaacaagagcagctatttatatttcgccattctggtttatatttttatttttcttttataaaaaatacaaaacgaatgctgaaaagctcgcgtatgaacaacgacaaaatgacagcggtcatttcagatatgacaatcaataatttaaacatctcgctctagtatcagttcaaccgatactagagtttttttgaaaataacttcattttatcaatatatctatgtcattatgccttaaaagtgataaaatattaactattaaaattttgaggagtattgtatggcactattagaagcatttttaatttttatttttgctgtgattattagttcggttatcaataatcgattcccacaaattcctactgcctttattcaaattgcattaggtgtcgttattttcattattccaatacaagttgatttccaattcaattctgaagtatttatgtttgccgttatcgcgccactactttttgtggaaggtacccacgtctctcgaacaaaattattagaatatcgtaaacctatactattaatgtcaatggcactagtgtttgcaactgtagtcggtgttggctattttatacattggatttggcctgccttaccaatgccagccgcttttgcaatagcagcaattttatgtcctactgatgcagtagcagtatctgctattacacgcggaaaattattacctaaaggttctatgacgattttagaaggtgaatctttactcaatgatgcagcaggtatcatttcatttaaaattgctgttactgcattagtaactggtaccttttcattattccaagctgttgaacaatttatcatttcaacaatactaggtgtacttattggtgcaattattggattcgttgtcgttagaatacgtatagacttaaccgctaataaaggtttaaaagataacaataccttaacctttattcaattattaactccttttgtcgtatactttttagcagaagaagttcatgcttcaggtatcattgcagttgtaatcgcaggtctaatccatggtttagaacgcgaccgtttaattagagcacaaacggaactacaaatgaattaccatcaaatttggaacacatttagttatgccttaaatggttttgtatttgttgtattaggttttatgattcctactgtagtcatagatattttccaaacagagcctgacaacttttcatttttaatagtgatcactatattaatcgctattgcaatttatgcatgtcgatttgtttgggtttatttctggtacaaagatttttatttcccgaaaaatatacaatcttatctagacgaggaacatgattcacatgaaacaccaccttctcgtgtgcgttacgcatttattatgaccatgtgtggtattcacggtacaatttcactttcaatggcacttacattaccatttatcattacaaaaggacaagcattcgaataccgtaatgatttattgtttattgcatctttcatggtattaattagtttaatcttagcgcaaattgttttacctttaatcacaccatctgccgaagatactacttttaaaggtatgacttatcaatctgccaaaattttcattgttcaaaaagtgatacagcattttaaaaacgaaagtaaaaaagacaaaaacgatacaaattatcgcccagtattaaaccaatactatggagaattgttatttttattaaattcagaacctgataatcaaaatacaaaagaactcaaacgtttagaagatattgcaaaagtaatcgaaacatctacacttgagcgtttaattgataaaggtaaggcaacatatcaggatattaataattaccgcaatattgtcgaattaacagagacacaccgtactgcatcatttgttgaaaaatttgcaaacttcttcaagatgttatggcttagactcaaagcgatgaagcactacaaagccttaaataaagaatctaagaagcaagaatttgaaaattcattcaaagatgttcaaaaaattatgcgtattgtgaatcacaatattattttacgcttaaaagaagaacaaaatagtacaaatgtacttgaggttagcttagtcattaatcattactatgatatgagtcgctcattaaagtggcgtgcacaacgtcgaaaagaacgtcaagaaaacagcaatcaaatcataccgcaagctatgttccataaccacaaattggaagcattgtacttacaacgtcatcttttagatgaattaattcgcaaaaataaaatcaacaatatcgttgcagctcaaattcgagaaaatatcaattacaacgaaattgtcttgtctttacagtccaaacattaagcaagacataacaacacccccgtacatatgagacaaagtcattatcatctcatatgtacggggtttttatattcaacatcaaaaaatcagattgatgaaaagtaaataacctttcatcaatccgatttgattatagaatctattttttaagtttaaatggaattgtacatacgttaacattcttttgataaattaaatacaatttcatacgcaaactagtttgattgtgtaataaattatgccaacgtttcttagtaataaattctggtatcactactgtaatcatatagttttgatcgttggctttacgattaatcttatcgataaaacgtgaaattggtcgtataatactgcgatattccgagtgtaaaataactaatcttacatctgggaaatgacgcttccatttctcttggaatgctttttcatcttcatctccaaatgatacatgtaccgcaatgacatcattatttgcaagcatttgtgcgtaataaatagacttatcaactgcagttgtaatgcttgttatcggcacaattgctaaattacgatctactacttctacattatgaacatcaatgtcagaacgtaattgttctgcgatatctcgataatgtttgttaattttcaagaagaaaatcaccacgaacggcaagaaaataagtatcggccatacttggctaaatttagttatgagtaaaatcataaaaacaataaatgtcacgataccaccaagtaagttcacagacaacttacttaaccaattcttaggacgttcatgaatccatttaataaccataccgaattgtgctagtgtaaatggaataaatacaccaaccgcatacaatggaattaaatcttcagtcataccatcaaatacaataattaaaataatggctaatacacctaaaataataattgagttagagtagcctaagcgatcacctctaacagtaaacattctaggcatatatttatctttagacattgaagccgctaacatcggaaaagctgtaaatccagtgttggctgctaataccaaaatcatcacggtcgttgcctgtacaaaatagaaggcagcattatcaccaaatatttgcatagctaattgtgataaaactgtcgtttccgtttgtggcataattccataaacatatgctaaaccaacgataccaactaataaaaacgctaaaattgaacccatagcaattaacgtttttacagcattattagcacttggttctctaaaattggttaccgcatttgaaatagcttcaacacctgttaatgatgaagcccctgatgaaaatgcttttaatagcaagaataatgttactccaggaaccgcagttcctactgatgcatgcatatgtggttgaatatctcctgtcgccacacggaaagtacctataaatattaatatcactaaccctataatgaaaagatatactggataggataatacggtggcagattcagttaaaccacgtaaatttaatattaaaataaaaagtacaagtaaacatgcaatcagtactttatgcccatataaacttgggaatgcagcaacaaatgcatcagcaccagatgatatactaacagcgacagtcagtatgtaatcgactaataatgagcctcctgcaagcaatccccatttttctcctaaattggtcttggacaccatatacgcgccgccacctttaggatatgcataaataatttgcctataagacataattaaagcagctaataagatcagaacagcacctgcaatcggtaaagtataccaagttgcaactgcacccactactgataatgtaatcagtatttgttcgggaccgtaagccactgaagataatgcatccgacgaaagaatcgctaaccctttaaacttcgatatcttttcgtcttttagttctctgttttttttaggttgccctataataagtcttttaaattgattgaacataatctcctattcctttttatagtttttgatggatatcactatacgcctatctttccaaaaagtatagagagttaattaatattttttatgtaattatacacctattaacatataaggtgtcaaaaataatggtaaatatacctctttaattaatttattcaatagaactggtataataaaataaatctcattaggcacttaagtaaatttaacatataaaaaggaacgtttatgactactaaaaaactgtattttctatccatttctattatcattttagtcgccatttcaattgctatatatataacattaaatagcaatacgaagacacggttaaccaatgattcgcaacaacaaatagataaaattatcgagcatgatttacaaaagggacacattcctggagcatcaattttaatagtaaaaaatggcaaagtttttttaaataaaggttatggttatcaagatgttgataaaaaagtcaaagcttctcccacaacaaagtatgaaattgcttctaatactaaagctttcacaggtcttgcaattttaaaattagctcaagaaggtcgattaaacttaaatgatgacgtatccaaacatgtgcctcattttaaaatgaactataatggtcaaaatgaaactattacgattaagcaacttttggctcaaacaagtggtatacctagtgatattacaagcgaagacgccgtaacaaataaaaataatcgtttaaatgatgtaacccgtgcaattatgggtgatgaattacatcataagcccggagaagaatttgaatactcaaatatgaactatgatttattaggtttaattatccaaaacgttacgaagcaatcctatacaaaatatattacaaattcatggctcaagcctttgcatatgacacatacatcattcaaacaaaccaattacaaatcaaaacatgatgctattggctatgaattacaaggttcgacacctgtcgtctctaaacctgaatttaacctttgggatacaccatcagcatatatgatgacatcaactgaagatttggaacattggataaaattccaacttaatccacctgataaatacaaatcattagttcaacaatcacataaaaatttatcttcaacaattggtgaacctaatgccaatgcatatgcttccggctggtttaccaataatgatgaacatttagtgtttcattcaggaacgctagataacttttcatcatttattttactaaatccaaaacaaaattatggaattgttgtacttgcaaatctaaattcggaatatgtacccaaattagttgagcatcttaatacacaaattgtaaatcacaagcgatattcgacggttgcgtctatgctcaatcaatataaagatcaatttaatattgttaccgttttgatgacaacacttattttattagcatttatattctcagcttatcgtgcttggcaaatacgccatggtcaaattcttttgcgtagatcaaaacggattgctgtattgagttggttatcattatgtatatgtatcgctttagcgctcatattatatgcattaccatatctcattctcggtagcaataattggtcttttgtactgacttggctaccaatagaaattaaattagcactaatcacaacattaattgcattattcagtacattaattgtaattctgttattccttcatacaaagataacgaagacataataaaaaagacttgttcgagccgtgcgtttgataatatatcatccacgattcgaccaagtctttattctttgtatattaaacggataaattattatttaattggattcatgccgtctttccaagttttataaatcagagtaccaccttgcgctttaaacttctcattgcttacgccacgttcaaatggttgcgcaggttgaatatcaatatttggttcaacaccaagttgttctttataccattctgcaaattcagaacctttaacaggtgcatcatctgctacattatagataccattttcaaaatgaatagcttgaatagatgtttcaactgcatcatcaagatgcacaaatgatgttacgccatctgaaagtgtcacttgaccatccataaattgattataaatcatgccatcttttccgtaccaagtacctgggccatataaccaaccaaaacgtaaaacaacgtattcatccatacgagccgtttcttcttctagaccaaccacaccatcaaccgttacttttctatcaccagttgagttaaaatcaagtgaagtttcctcatttgctaatccttcgccaggttcatacataaaggcaatactttgggcaattactttcttaacgtcatgctttttcgccgcatcaattaagtttttagaaccttcaatacgtactttcgtatttgctgccatatcaacattttttaaatccgtaatttggttgataatgatttctggtttaaaatctgctaacgcttgatcaatagtatcagcttttaatatatcaccaatatatgcttttacattaacagcagctagcttttgttgaccattctcagatgtagtaaaaccagcaacctcatgcccctcttcttttagtctttgaactaatttaatgccaataaggcccgttgcaccagttacaaaaattttactcattataaacaccttttctctatttgtctttttaatataattacttgcttgatgagtttacaaaattcacgtgagacttccaaatgatttgcctcaaaatttttcaaagtgtcgtcgtaaaaactgtctagtaaatactaatagtatgtcgtagacctatgacaaatctgaattatgacgaagatcaatcaagaaaaacagcaccaagatcatttcaatttgaaagtaccttactgctgttctttatttattacatttcaatcttaataatgaccgtaatatcacgtgattgtcatttccttgtaatcatacctaaaacaccaattaatcctgtgcgtgtcgctgactttctttagtatgaattaaatcagtaataaagcgattgactggcgcttcaatatgacgttgtttacctaatgttgcaactgcgccattaatataatcaatttcagtttttctattattaacaattaaatcttgatacatggatggataatgcgcaccaactttttcatttaaatcaactaaatattcaaatacttcatcaacatttaaatgaacattatcaatcgtcgctacatgcactatttcttgcgttaatttataaatcaaacacttcgcataactactttcattcagcgatgccatattacactccaacactgtgcttaatgcatttgccgtaccattaacacaaatctttttccaaatcgattggtataaatctttactaatgacaccattcaattccgcttcgttaagtaaatcagcaacttttataacattttctttaccttcatccactagttcacctatttcaactggtccactaccaagtaaatgactgtgtccagggctttcaagacctgccgtccaagtcgtaacacctctgacaatttgtgattgagcaacatactgcgcaatgacttcttcatgcttcagaccattcatcgtacatacgacgatcgtttcattatcaatatgtggcttcatatcttccatcacttcttttaattgcattgactttggaaatagaaagacaacatcgtaaatgctttcgtccggttgatcattaaaatgatacatcggaatgtttaactcgaatgcctctccattaatcgttatatttaatccatgttgcttaaccgcttcaacatgagatgtatatccgtcaataagtgtgacatcatatcctgcttgaaatagtttggcaccaaagccactacctaatgcacccgatccagcaattgcaattttcatcctataaacccctcttcatcgttgttgttcattttaaaaatactactttcgcatattagcgtcaatttgaaaatcattcgcttaatatacacacagcttttatcgtctataaaagaacacacctaacattaaacgtcaatacgcaacattaagtgtgtatgataaacttactttcacaaaatttcctttaaaatccctacataataacttgctttcatttcagttttacaaattcgtttgatttttaggaactaatagtaaaatgactaaaaatgcaacaattgctagcaaagcattaaacatcatacctgtgaaaccacctaagttcaaatttaaattagctgctaacacagtataaaccgtaccagatactgctactccaaatgcatttcctaatgatgacgccattttatatacacctgaagcaacacccgacttatcatctggcgcactagcaactgctgtatcagttgatggtgtagcatataatcctaaaccagtaccaaacaataaatatccaactatactagatacgatataccacatttctggtaaaaatgttaacgacaataagattaacccaatcactgtaaagccacttcctagtaatagtgggcgcttcgggccatgttgagataaaatcttttcacctacacgaatcattgacaacactgctattaaatacgttaatgaaatataacccgtttgcgaagaattaaatcctaattgttgttgatagtacgtgttaatgacgataagtgcaccacctgctacaccgtttaataagaagtttgaaatagttgcaccactgtatcctctatttttaaaaattgaaaaatcaacaagtggatgctttattttattttcgtaatatacaaaaccaactaatgaacagataaaaactacaattaaacctagaattaacggtgaaactaaaccaaaatgagacgtctgtgtgatgattacatttaaacttaacattgtcactactaaaatgactaacccgataacgtcaaactttttagcttctgctttcatacctttgattggttctgctttagtctcaggtgcatgtttgattaagtacattgctaataatgttaatagaattgaaacaacaaatattgaacgccaacctatatatgtagccattaagccaccaaacaacgtacaaataccactaccaccccaagaaccaatagaccaatagcttaaggcacgttgtcttcttgtaccaatataatattcgttaataatagcaagtgtggatggcataatacatgctgcagacaaaccttgaattattctacctataattaaaaatgctggcaaaggtgtaataatgatgagtaatgaacctacaacatttaatatcaatcctacataagtaattttgacgcgaccaaatttatcagcaacatcaccagcacctacgataaacaaaccagcaaataaggcagataagctaacagcgatatttatcgttccaacgtcactactatatgttgattgtaatgggacaacaagattaacaagtgactgcgcgaatagccaaaaggtaataacccctaaaacgatacccaaaagcaatcggttgtcacctctaaattgttttgatgtgtccatgaattagataagcctcctatgtttaagaaaaacaaatttttaatatgatatattaagaaacaatatcataaatttgcagaaaattataaataaaacatctcattttttagcatttttacaataattaacgctttttatccaaaaactttcatgataataattgctattttagtgtaaacgcatacaaacacaacctataaaaaggctactcaaagattatttgagtagcctcattttttataaatcatgaaacgaaatcgctaaattataaacatcttctactattacatattaatactttgcggccgatgattagattgatttttacgatgtcgtgttgttgggtctaatcgtttttctaaaaatcttaatagtacatcaatgacgattgcaatgatagcaatcggaatcgcacctgctaaaataaacgttgtgccatccgtcgcatttgtaccacgaatcacaatgtcaccaagcgtaggtgctcctataaatgatccaacggcaacaacacctatcgcaacaaccaaggcaatacgaatgccaccgataataaccgaaacagataacggtaattcaatcattcgtagcacttgattgcgtgtcattcccatacctttgccagcatccttaatattcgcatcaacactagctataccagtataagtgttttttataattggaagtaacgcatataaaaacactgttaaaactactgtttctgaacctaagcccatgactaacattaaaatagctaacattgcaatgactggaactgtttgaattatatttgcaattgtaattacaaatccagaaagttttgtgtatcttgcaagcaagattcccaatggaataccaattaaagctgcaaacagcacaccatagacagacattaataagtgtttgaaaaataaatcccatagatagccaaagttcgtaacataataattgaataattgctgtaataaattaccttccattacttatgaccacctttctgtttatcaaaatagtggtgttttttcaaaaattcttctgcgacgacagcaggttctttacctttaccatccgcttcataattcaagcgctgcatctctgaagttgaaatctttcctgtcaacttattaatcgtcgttttaagttctgggtgttggcgtaataattcatttgttgcaacagcactcgcagcataaggtgggaaaaattgtttatcatctttaagtactttcaaatcatacgcggcaattcgaccatctgtagaataacctaatgcaacgtctaacttctctgagtttaatgcgtcgtagacaagacctatttgcattggtctcactgtaccaaagtcgaaaccatactcttttttaaatccttcatagccatcgcctttacgattcatccatgaactatccatacctaaacgtaaatctttactatgctttgctaaatctgaaactgtctctaaatgatattttttagcagtttccttcgttaccatgaatgcatacgtattcgcaaaaccatacgaatcaaaaaacgtttgatcaaatttctttttaaatccttgttgtgtggctatcattgctttcttaggatctttaattggtgcttccttcaaagctcccgttaaatctgtgccattatatctaacacctgatatattagcatccccattaattaaggcattatgttgaatcgtacttgaccctaaattatttactaatgttggctttatcttaccatgtgtatcatgctctattaacaaccgtaacgtatgtgaaataatttgcgattcgcttgttgataatgctgtaattttgacatcatttttcgtgctcttactacctagtccgggcaaactacatccagataatacggtaagcgataagacaaacacgacaagtatatatttaattttcttcattatcttagcctcctaattatccagatacttttaagcctttgggaactacccatttttcaactaaagctaataaggcatcaacacctaatgctagtgcagtaacgagtaccgttgcagttacaatcatcagtggatcatataaatttaaaccattgaaaatgaaatcacctaatccacccgcacctacataacttgcaagtgtagcccaactaattacatacacagatgacaaacgaatgccaccaatgataagcggcaatgctaacggcaattcaacatccttcatcaattgaaattgtgtcattcccatactttttccagcttctttaatgttgctatcaatattttgaacaccgagtaccgtgttatttaaaataggtaataatacataaataaatagcgctacaattgcaggcgttttaccaacaccaaaaatcggtatcataatagcaagtacagctagtgttggaatagtttgtaagacacctgccacagttaatataatattggcaattcgctttgtttttgataataaaatgcctataggtactgcaacaatgatggcaagtaataatgccactatagaaatatagaaatgttccagtgttttcgacatcaactgtccaccatgttcatgtaggaactcgatcatgatttatcatctcctatgtcacgtactttgacattagtagtgtgttgctcatgcacttttgaggacgcagtgtctttccccacatgttctgtttgcattgtatcctcactatcgccccaaatcgtgtcatatacaatatcaacaacattggcacgcgtaatcagtcctactaaacgctgttgatcatctacgacaggtacattcctaacgtttctttttaaaatcgtacgtacagaatcttgtaacttagaatcaatttgaacggtataaatatgttgttgcatggtttctcgtaaacttttgtgtccacgtataccctgatttatatcttcaatatctaagaatcctagtaaatggttatccctatctactacaaaaatagtatcaacacgtttttgtctcataatatgaacggcgtcattcagtgttgcttctgcttgtatcgtgattggtttaatcattacaccttctacagtcttgtcattgggacggtcttgaatcagtctattttgtcctataaaatcacgtacaaaatcatttgcgggatgtcttaaaatattgtctggcgtatcaaattgcaccaccttaccttctgacataatacaaattttgtctgctaatttaatcgcttcatccatatcatgtgttacaaagataaacgtcttgcctaattttcgttgtaacgttttaactaaatcttgtaacgtatctctcgtaataggatccaatgcaccaaaaggttcatccattaaaataatatcttgttcggccgcaagtgctcttacaacaccgatacgttgttgttgcccacctgatagttctgctggataacgctctaaaaatgactccggtaaatccacaagtttaattaattcctttgcacgtttatccttttcttctttagtccatttcaacaatttgggtaccaatacaatattctctttaatcgtcatatgaggcattaagccaatttgttgaataacatagccaatatttctacgtaattcgacaggattcatactccgaacgtctttaccatcaatttcaatttgtccttctgtcgcttcaatcatacggtttatcattcttaaagcagtcgttttgccacttccactggttccaataaatgcgataaattccccagattgaatatctaaagagatgtcatctactgcctttttattaccagaataaattttcgttaaatgcttaatacttaacataatcatttctccttcctcataaaaaatatgacgaatgatacgcataaaataaaaagaccatcatcgcaattgttaaacaaatagagtcataagttaaacaagtacacatcatggtcttgattatgtagaattttatatttttcatctgtaatgtgaatacttaacagtaaacggcgctatgtatgttgaatttataccgattactttgtttgcacattcgtatattcgacatttaaaactaacatactctatatgatgttattaaacattattattttatctttggcaactaaatagataactcatattttttaaaagcgaatttattatcgctcaattggttgttttatagcaaaaaagtgtcgaaaatgtgaaatattattgcaaaagtcgaatttttgtaataatgcacacgcatccattgttacaggcggacaaacgtccatccgccactcacaaagtcatccttatattttaatatcttcatcattcattgtagacacccttgccttttgctaacattttctactcccaagcctgtaacggaattccaacgtcaaagtgttgcccatgacagacacacctaaaaaaacaaccaacagcatgagccattggttgtttcgtgtcatcttgtatgttgttgtataaccggtatgctttactcattaattacttatcatgcatccctttaccttctagtatttggttaatatacttttcaacacgcttttgtcttgtttcactgcgtttagcttgtccaatatgatatatatattggtgttgtctgcctggcgttaatttataaaatgaagactctaactgtggcatttcttcgaacttagcttctaactctttaggaataacatattcctctgttttcttcatttcaacttttttaccagctttttcagctttaattgcttcagctagataatatttaatttcttcgctacgtgcttgaatctctgttaaattttcaaatcgtaactgacgagctgcttgcaccttttcagtctgttgaatgagtgtatgatatttatcctccaaaatggcacctttatgaaataatagtgcaacataatttttgaagccatggataagtactacatttttattattcaacgtgtaacaaggatgcatccatttatacgcttcctctaattctgtttcattaaagattaacgctctcaaatatttatattcttcttgccattgactctctttatttaaaaatgcttcaacttgttcatttgattgtttctcactcatagtcatcacttccattttgttttccaatacacattgtattatatatcctaattttataaaaaactaattttacaaatgcttttgcgttcttacaaaaaatgcatttgactattattataataagcgtataattgtcgcatattattttttgtatttttggcaataacgaaggagtatttatgaataaagacaagcaattgcacaacgacaaaatcaatctatcccaattagtgttattagggttaggctctttaataggatctggttggctatttggtgcgtgggaagcatcatcaatagctggaccagcagcaatcatatcatgggttcttggattcctagtcattggaaccattgcctataactacattgaaatcggcacaatgtttcctcaatcaggtggcatgagtaactatgcccagtatacacatggctcattattaggctttattgctgcttgggcgaattgggtgtctttggtgacaataatacctatcgaagctgtgtcagctgttcaatatatgagttcttggccgtggcattgggcgaaaccaatgagatatttaatggaaaatggctctattagcacatacggattgctagctgtatatctcatcattgttattttttcattattaaactattggtccgtaaaacttttaacatcatttacgagtttaatttctgtatttaaattaggcgtacccatgttaaccatcatcatgttgatgttatcaggattcgacacttcaaattacggccattcggcaagcacatttatgccttacggaagtgcaccgatttttgctgcaacaacagcatcagggattattttttcattcaattcattccagacaattattaatatgggttcagaaattaaaaatcctgaaaaaaatatcgcaagaggcatcgctatctcactgtcaatcagtgcagtgttgtacatcattttacaaagtacgtttatcacttctatgcctcaatcaatgttacaacatagtggatggaatggcatcaacttcaattcaccatttgctgatttagctatcttattaggaattaattggctcgcaattttactatacattgaagcttttgtatcaccattcggtactggcgtgtcatttgtcgccgttacaggtcgagttttacgagcaatggagaaaaatggacatatccctaaatttcttgggaagatgaatgaaaaatttcatatcccccgtgtagcaatcatctttaatgccatcattagtatgattatggttacgttatttagagattggggtacgctagcagcagttatttctactgcaactttagtagcctatttaactggcccaacgacagtgattgcattaagaaaaatgggaccaacaatgactcgtccatttagagcaaaaattttaaaagtaatggcaccattatcatttgtattagcttcattagctatatattgggcaatgtggccaacaacggctgaagttattttaatcattatacttggattaccaatctacttcttctatgaatatcgtatgaattggcgtaatacaaagaaacaaattggtggtagcttatggattattgtatatttaatcgtgctatcaatactgtcatttataggaagcaaagaatttaaaggcttaaatatgattcactatccatttgactttatcgttattattattgtggcgcttatattctattacatcggtacaacgagttcatttgaaagcgtctatttccgtcgcgcaacacgaatcaatacgaagatgcgtgagtcactaaataatgaatcaaagtcatctcattaaatattttaaaatacagtgccatatatgatttcaacacacacattaaccaaccattgatttcaacatcttggttggttttttattttgaaaatcggttataaataactaacataacaagatggcgagagtgatattgtaatgaaatgtcactgtagaagaacatcatataatgctgaaaaaggtttgagttaaaacagatatcaagctcgtctgattcagtcacaaaattgtcttgttatacttgtcacctatcatctatagaccgtggtatgattaaattggggatgataaaggaggttaataaatatgaagattaatactacaggtggtcaaattcatggtattacacaagatggtttagatatcttcttaggcattccttatgcagaaccaccagttcatgacaatcgctttaaacattctacgttaaaaacacaatggtcagagccaattgatgcaactgaaatacaacccatcccaccgcaaccagacaacaaattagaagattttttctcctcacaatctacaacttttactgaacatgaagactgtttatatctaaatatttggaaacaacataatgatcagacgaagaaacctgtcatcatttatttttatggtggtagttttgaaaatggtcatggtacagccgaactctatcaaccggcacatttagtacaaaataacgacattatcgttattacatgcaattatcgtttaggcgcattaggatatttagactggtcatattttaataaagattttcattccaataatggcctttcagatcaaatcaatgtcataaaatgggtgcatcaatttattgaatccttcggtggcgacgctaataacattactttaatgggtcagtctgcaggcagtatgagcattttgactttacttaaaatacctgacattgagccatacttccataaagtcgttctactaagtggcgcactacgattagacacccttgagagtgcacgcaataaagcacaacatttccaaaaaatgatgctcgattatttagatacagatgatcttacatcattatcgacagatgatattcttatgctgatggcgaagctaaaacaatctcgaggaccttctaaagggcttgatttaatatatgcgcctattaaaacagattatatacaaaataattatccaacaacgaaaccaatttttgcatgttatacaaaagatgaaggcgatatttatattactagtgaacagaaaaaattatcgccgcaacgctttatcgacattatggaattaaatgatattcctttaaaatacgaagatgttcagacggcgaagcaacaatctttagcgattacacattgttatttcaaacagccgatgaagcaatttttacaacaacttaatatacaagattcaaacgcacaactatggcttgctgaatttgcatggcatgatacttctagcgcacactatcgcagtgcttaccatattctagatatggtattttggttcgtaaacttacaaatattagcagcacatcaatatccaacaactgctcaccttaaatttttaagtcgacaaatgcaaaatgatttagctaattttgctaaaagcggtaaaatgccttggccgatgtatcataatgaacgtcgctattatcgcacatatcaataacgttatcgcatctaaaaaagcacacctgaatttgatagcaggcgtgcttttcatatgagaattatgatgatttaaatgttttagcataatgattatttttcaatgtgaaaacaacgattaatcctaatgcgccaatgatggcactcgtatacgtgatagcttgaacagaaacatgtgtcatgaccaagcctccaataatgccaccaacaccaataccagcgtttaaactagacatgttccaactcattacttggcttgtgtcaccttcaacatgttgaatcacaccgctttgcactgctggattagtactccattgcatgatattccaaataaatagtcctgctaacaatagacctgaaccaggtaagattaaattcataagtaacatcatgacgataaaaatagaaacagaaatcattaaccaacgcttacttgtaattttatcggagaatataccacctaatgatgttccaataacgccagcgattccatttactagaagtgctaatgaaacgaatgacatatcatgaccattagataaaataagtggatttataaagacgaatgtcactgagtttgcaatcaatactaaaaacgtaataattaaatattttgctacttcagcaggtcttaatattttcgaagtaacatgattttcatgagatggtgcctcatgattcacagggcctcgttgtatttccttatccttcggtaaatagatcatcatcaagaagccaacaataatactcacaataattaaaaatagaaaagtatagcgccaacctactaaatcaccgataaccgttccaattggtacaccaaaaacattagcaccactaaaccctgtatagacaagtccaatcattttgccacgatttttaggtgctgataacatcgctgtaatagctaatacttttacgataattagtgctgctgctgcagatgagataattctaccaactactaatattgaaaaatttggcgctacagcaataatgccattaccaatgataaatataagtaatgtccataataatacaggccttgatgaaaaacggttcgttaatttaaccagaataggtccacatatcgcaaatgttaaagcgtacattgtcactaattgaccaacgacagcttctgatacatgtaagtcctgactcatcaagttcataattcctgcaaccatcatttcaaccattcctacgataaaaatacttaaaatgaatgtaaatagtcgcatgattgacattttaaaactcctttcaaacaaaatttccgatattcatttcccttagaataacgatttattaaaaaatgtgtgcaacacaattttatatataaccgttctattatataatattttgctttaattttctgtgcttaattggaaaattatttaaattgtttttcagtatttgaaaaattaacacaagtatgtcatttaataattatgtataattacttcagtttcaacaatgactcccaaaaagcacgcacgctttatatgtcagaacagataactgactacaaagtatgcgtgcctttatgaatattttcgctgtgttaatgaatagcgatactatatgtgcgagtcgcttcatttccaattaaaactaatacctaaatctgatgcaataaaatctatcatgattcactcttaacatcagtatttcgtgctactaattgatgtcttgcattgaaaaattgaccatagcttaaatatgtcgcaatcaaagcagacataatggtcgcagttgtatgaataaacacgactaacaattgaaatttaatcgcttgtaaaggtggtacgccaccaataattaagcctgtcatcataccaggaatcgacacaagcccatatgttttaaccgaatcaattgttggcactatagctaaacgaatactttcacgtattgcacctttagaagccaatttaggtgtagctgcaagtgataatttagattcaatattagtaccatcttgtacgaatgcacgatctaaattctggtaagctaaattaattgcaatcaagccattattagcaagcatgccgccaataggtataacttcattggctgtaaattgaatggcccctgtcgcaatagtacctgcaagcggtaatgccgttccaatgaagatagctagaaatgatatccaaaacacatgatgcatcactggtgatgctcgactaattgtattccatgatgcattaataataatgaccaatacacataaaataagcagccatttatcgtttattttaaaaatataatgcagcaaaaatcccaaaatgattaattgcacaactgcgcgtaatgtcgcaacaattaaatctttaataatatgtaaaccttctttatatgaaatgataatcggaatgactaaaagcaatgccgtcaatccaagtgccgtgttactcatgttgattcaactcctcaaccttagaaattttgccatcaacaatcgttatgcgcttttgaaaatgtctcatactttgatcatcactatgggtaatccacatgatagaaacatcctgttccactaacttaaaaatgatattttctatcttttctttattatgaacgtctaatgcactggtcgattcatctaataaaagaatatccggtgtatacatcagttggcgcgctatagcaattctttgccgctcaccacccgacatattttccacttccgaacttaattgataatgtcccaaaccgacatctttaattaattgctttgcacgttttctatcaaatttatcattacgtgcaagtgatgggaatatcatgttatcttcaatcgtttcaccaaacaagtcactttgctgcatcaaataactgattcgttgacgcaattcttccgggtcataatcattatagggtttacctttaaaataaagttctccactagttggactaatcaaattacatatttgcttttgaaatgtacttttaccactacctgatggacctataatggcaatgctctcgcctttatctacttttagactgatatgatctagtatgattctatcgctcgctttatacactaaatctttaatttctaacaacatttgcaccgctcctcatgtaatatatcaggtatattattcccgtttttttggtttttagtgcaattacatttaagaaaaaatcattttcttgtaatatcaaaatttaggcataattgattttcagcatttaaattaaaaacaaaaaatcctattaacatggatactgtctaatgactaagaattaaagttagacaattgtttaacaacctaccatattaaaaggattctttattatttatggatttgattaccacatgatatttttataactttcatcattcaatgaacggacaatttcagtaacaagacggatagaattttcataatcatctacattgagcactgaaacattagaatgcatgtatcgcagcgtaacaccgattgtcatcgttggaataccttcatttgcgacatgaatacttcccgcatctgtacctccacctggtgtcgtatcccattgtacttcgatgttatgttccttagctacatctttaatatgcttacgcaaaccttggtgagcaatacttgtagcatccatcataatgacaactggaccaccgcctagtttactatcgctcgtttgacctgacatacctggggtatcataagcaatacctacatcgacagctatcgccaaatctggtttaattgtattcgctgccactttcgcaccacgcaaaccaacttcttcttgcactgtggcaccactgtataagttaatgccaatattttcatcttttaaacgttttaatacctcaacagctaatgcacagccatagcgattatcaaatgctttcgcagttaaatatttatcatttgcaagcacttcaaattcactatatggcgtaaccatattgcctacttcaacgccagcttcttcagcttcttccttgctactaacaccaatatctataaacatatttttgatttccattggctttttacgttcttcaggcgttaagacatgtggcggtttagaaccgatgatacctctaatttctttgcccgaatctgttgtaatcgttactttttgagatagcatgacttgattccaccatccaccaactggcgtaaatgaaataaaaccatgtttatcaatctttgttaccataaaaccaacttcatccatatgaccagaaatcataattgagtattgaccattctcagcatttttctttccaaaaatgccacccaagttatcttcaataatttgatcactgacaggctctatatagttacgcattgcttctttaacttgcatttcataaccagcaatgccgtttacatctgtaaaatgtttaagtaatttgactgactgattcatgttattcatcctcctgtatttcaacttaaaactattgtatcactaactttcagaaaaacgttccctaccgctttatcatttttcaggcttaaatatttttaaaattttgtgaggaatccgcttaaaaaactcatatctttaaaatttaatattccgaaaaagtcacaatttaaaattccttattataatacgttattcttttattgttactaatttcaatctgtttagtcttgcgctattataaaattaaaaagtgtagagataacaacgcattaacgtcgctattttccctacacttaaatactagtttctttaattaacttatcattaaagttattcagatattgaatattcattaatcataatgtgaccatgccgatagtattaatactactttatttcgatcatctatggtatagacgaccctgtgctgaaggttaattcttcttgaatatcgctctaaatatttaggttctaatttttcaaaggattgtgttattttataaggattattttttaaagtctcaacaatttctataaatgtcttctttaaataaggatgttttattttctttaaatctaacttcgccgaatttttaatcttaaccgtgtaattgctcattaaagattatcccaatcaatatcatctatatttgttgtaccactattatctttttctctttctcttactttgtccattgtaccagtagatacaagatacattgtctcttgtatacttttccaatcttctaaacctataatcacagcattattttcggcattattaccactaatataaattggttcgtgattattattaacattttttagtaattgataaaaatcttttctcgcttctgtagggctagtgataatcatataaatcctcctttgtcttctgttacgctaattatggcgtacgtatttaagtacgtcaatatcaccgacacatccgtcgtaatcttagtctctatatgctatcgtacacaagcttttgttcttttcttccaacataccgtctataatgctcaaaaagaaatcagcagtggaacacactacgttccctaccgctttatcatttttcaggcttaaatatttttaaaattttgtgaggaatccgcttaaaaaactcatatcttcaaaaaaaagtgacaaaatttaaatttttgaataacatcattttttagtaaatgttataatttctttataatacaaatatcgaaagaaggcgactgactttgaaaaaattatgttcattaattgtagtagcattagtttgtatcattgcattatcagcttgtggtaaagaacaaaccaaaacatatgaaggtgatgttagtggtaaacatgtactaacttctatcacatataaagatgataaagttttaaaacagtctacaatcaacacaattaaatatgacgatctaggtatggataaagacgaagccaaaaagttattcgccaaatctgaaagtattttcaaagaccttaaaggcgtaaaatacaaagtagactataaagataaaaaagcaattgaacacttagacatagattacacagaagttgacatgaaaaaattaaataaacgtcttggtgtttcaactaaagaaaataaagatattagttttgaaaaacttgaaaagcaattaaagcacagaggcttaaaagaaaaagataaaatggacgacaaatagtttataacataaaaatgccctcagataagactaaggttacaaaccttaactcatattctgagggctttaatatttgaaattcttgtgtgaccagcatccactactaatataaaattatttgcagtaacactaaaatccgctgctttcattttctcgaaatagataaatcaactaatcaatttcaatttataatcatgtatcgtttgtaactcaccatcgacttttcgatatacaatatgatcagcagtaatttctgtaggactggatacgccaacagctgctgcaatattgaataagccttcatgcaaacttgttacatagtttgtgacacgatattgcttttctccaacaatcaatgctttttcttttttagcatctgttgttgcaacaccaactggacacgtattcatgtgacattgttgactcattatacaaccgacactaatcatcatcccacgtgcgatatttacaaaatctgcacctaaacctagtgcaatcgcaattttatctggtgtcactaacttaccagatgccgccaatttcactttatctcgaataccatatttttctaacatgccagacacaataggtagagctgtaaatagcggtaagccaataccatcttgtaattcttggaatgttgcaccagtaccaccttcaccaccatcaatcgtaataaagcttggatacttatctagttccaccatcgtacgtacaagtgtttcaatttctgaaactttgcttactacaattttgaatcctactggtttttgacctaattgctgcaactgatcgacgaaacgaatcaaatcttcagcattatgaataaattcgtaacggttaggtgaattgattgttttataaggttcaacatttcggattttagcaatttcttcgtttaccttttcagcttccatatgaccaccacgagtcttagcaccttgtgccaacttcagctcaaatgcgcgtacgttagataactgtgcaacctctttaaataaaccttcactaaaattaccttctttatcacgaacaccaaataaaccgggaccaatttggaaaatgatatccccattaccttttaaatgatattctgataagccaccttcacctgtattcatccaagtgcccgctttagctagacctttagataaagctgtaatagcattttttcctaaagcgccataactcataccagattgtcctacgatacgttttaaaataaatggatgttttaaacgttcacctaattttattgcatggtcatcacttaagtaatacggatcaatctttgtcggtacacgatattcttcacgactaaataaacgctcattcgcgattttataaatgaatgttgataacaatgttgtattatctactgaaatctcattacgttgcatcggaaacattgtgttctgtatgtaaaagccgtcttgataatctttagtagtaccgaagctggtcatacgagagttatattttccagccaaaacgatatttttatagtcattacgtgaaaaaggtttcccttcattatccccagaaaataaatactgacgtaattccggtcccattttttctgaaatatatctaatacgtgctagtaaaggataattccttaatacactatgttgtgattgtcttttatctttaattaaccaaataagcccgataacaataaccgtaagcatgaatcctacaacgataatgttaactataaattgcatgactgtaagaaacgtcattacaatacctcccccccaaaatttcaattcaatatttatgatacaccttacaaaacaaaacacaatggaagcgcttcattttataaaacgattttatgatatgtttttcattttaaattttaatgtataaaacatacaatacaaagtaatatgtgctaaagtatctatataatacaactatttaagaggtatactatgtcaaatacaaataaacattacatagaagaagaatacgctaccgaacaatcgcgttttttcaaacgtgatattggatttattttcctttatatatttttggttaacatcttgccaatcattatcgtctttttaacttttgggttagtagctgtattcactcaacaagccccatggggtttctcttttcctatttcaatgaacattagctatatactcgcagttattatttcactagctatttttcgtcggatgcatgaagatgcatttgttccgatgatacgtacgcaaatcattgccagcaccaaatataaatggcatattcttatatcatttacactaagtgtcgtactctttttacttttaaattatttcgatattttcgcactaaatgtagatgcctttactgtctttgacatttacccgctcattagagattatggttccatcagtttaatagtaatgttgtggttaaccattatattaaatactttaatttgtcaacttattttccgtcatattttaattcaagaattaagcagaatcatgcctttaaagattacaatagtattgtccattatccttgaaactctgttctactatccatacattaatacatggtgggaattcattccagcattgatactagctagtagtgcgacttacttatatttaaaatcaaaccgtaattttatggtgagctatttttatcaattagcagttatactcgttttgcatattttcatgtaaaatatttcagagtattatccattatccatacacatcaaaaagcacacttaaaagtcagtatcgcaactcacttttaagcgtgctttatttagatatactgtcgttctaaaaacgagccatatagagagcctgagacataaatcaatgttcaatgctctacaaagttatattggcagtagttgactgaacgaaaatgcgcttgtaacaagcttttttcaattctagtcaaccttgccggcggggccccaacaaagagaaattggattcccaatttctacagacaatgcaagttggggtgggacgacgaaataaatttttcgaaaatatcatttctgtcccactcccatgaatcgccatgctcaatataccttttaaaatttaaatatttattaacttaatatgctttaattcacttcattaaagactatttgctgggcgtggtgttggttttttcaataaactcataatcattattacaatgactaacataccacaaattagatacatccatttaaatcctactaaatcggaaataggtcccatcaatgcgccacctaacgatatacctaagtctgcacaggcaataaacaaacctaacaacatattacgacctacttttggtaagacgaagcttaagtatgatgttaatgttgggtacaccattgcttgtgtcattcctattaatattgcactaccatagaaaataattgcacctacttgcggaccaaatgccactacaaatgacgcgatcactaataatgatagtacagataccatatatttaggatgccacataccatctgacggaatgtatttccttaagtaaaatcttgccacaacaactgcgatggcctgtattgtcaaaaagattcccgcattcgcgaatcctaaactcactgtgtataacggtacaaatgtactaactgcaccaaatacaatcgatgcaacaatcatgataataccactgttcaacaactctttatttttgaaaaattgcgcaaaaacagttacagcgttaaacggcattttttcaatcttatctgacgtatcgggttcctgttcagcaaaggtcacgcgatagccaaagaatgttgttgttaatgcgataaagataatgacaattgcaaatagtgaaatattatttgcattccaaatacctacggcaactaatggtccgattaagtttggaatcgttgaaaatagcgagtacaatgatacaccttcagaacgatgttcctctggtaatgcatcaataatacctagctgtaaagacatagaaaagaatgccgtacacacaccttgcataacacgtgctacgaaataaccttctaagccagtaaaaccataaataattaaagctatggcattgataatcaaaataattcttaatactttaatgggaccgacacgagcaataatttgtcctgcccatggtcgaaataccattgctgttaacatgtatgcccccataacgataccgataaccgtattcgttgcgcctaaatcatgccctcgtaaaggtataaacacgtttaagattgcattggcactaaagaacatcaatgttaatatatataatctcaaaaagggccaagccattgcacctttcattatctcactccttagaatgatagttgtttttctattaattctcttgtataagcattgtcacttttatgcaatgcgcttgttggaatttgttcttctatttttccgtttttaaaaataattaattgatcacataaatacgtggcagcttgaatatcatgtgtgataaaaatataactcaactgacgcgtttcacgtaaatgaatcaataaatctaatatttgtgtttgaattgacatgtcgagtgaactaatggcttcatcaaacaaaatatatttagggttaatacatattgcacgcgcaatcgcaacacgttgcgcctctccacctgataacatattaggatatttatccatgtatgccttagatagaccgacttcttccaacaatgtaattgcttggacttccataacttctttaggttgtccatcacattgacacatcacttcaaataagatttctctaacagtctgaaatgggtgtaatgatgacgtataatcttgaaatacagcaccaatttgatgacgtctcactttcttcttatgcatcggtagatcatttaaggttacacagcctttatccggtttctcaatacctaatatcatacgactcaacgtcgatttaccgctaccactttctccgataatcgcaatcgtcgcaccgattggacactcaaatgacacacctttcacgataggtgttcgacgacgcttaaaaacatgtgcgctttgatatgacttttcaacatctttaattttaatcatgtacatcacccctcatcacatgtttaaaatgatcattaatcttcttcttggttgataataaatacttcgtataaacatgttctggatgatgcaagactgattcacgcgtaccatgctcaatcagttgaccatttttcatcacaacaacacggtctgcaatcttgttaatgaccgttaaatcatgcgaaatgaaaatcattgcacagtcaaagtgtttctttatatctataaatgcttccagtacatcatattgtgtaattgtatctaaagccgttgtcggctcatcagcaatgattaactttggtttcaaagctaacgctaaagcaatcatcaatcgctgtaacattcctcctgataacatgtaagggtatgattttaatatacgtttaggatctttcaaacttaaataatccatatattcaatcaatgtcttttcaatttcttgtgtagacattgacgtatgtactttcatagtctcaaacatttgtttaccgacagtagttgatgggtcaaaggcacgactaccttgttgcatgaccatcgcaatatctttaccacggtattttttcaattgtgcttccgataacgacaacattgatgtaccatcaaagataatttcacctgtcaccccgagtcgttcgggattcaaaccaataatcgacttacaagtgattgatttaccgctaccactttctccaataacgcctaaagtttcacccttagttaatgtaaaattcacatcactcacgagtggttgatctgtccaggtatctgtaatcgtcaaatgtttaactgttaacaatgtcatgattgcaccactccttttttcacagaacgaagtttatctttagaagagatgcggggatcaatagcaatttgtaaagcatcggataagaagttaaatgccatcactataatcactatggcaatacctggcgcaaacatcatttcaggatgtgtaaacatcacttttctagcttcgttaagcatcatgccccattctgcagtaggcgctttgacacctaatcctaaaaatgaaaagccagatatttgcaagatcattgaacacatcgaactactagagatgatagcaatatctgctaatgttaacggcataatatgtttgtgaataattttcatatcattcataccgattgttttagcaaatcttacatggtcagaagcagtgtactgcataacacttgtacgtataacacgacagaaccatgcccaacgcgtcaaaataaatgccatgataatattttcggcacccattccaaacaatgcaattaatgctaacgttacaacataacttgggaatgccaacataacatcacacgcacgcatgattaaggcgtcaacaaacccttggaaatatcctgataagaatcctaaaatagatccaataagtacagaaacaaatagcgcaacaaagacatataacaaacttggtctaatcgcataaattaacctagttaaaatatctctacctaaatggtcagtacctagtagatgttgaaaactgatgccagcaaatttgtttgctgtatcgatatggttaggatcataaaatgtcacaagtggtgctgctaatcctaaaaagacatataatacaataatgcctaaagcaattactgcacctttatcttgtaataatcgttttaaaattatcatcgtgcgccctcccttaatcttggatttaatagcgcattaatgatatctgctaatgtattaaatacaataaataataccgctacaattaatacatatgcttgaatgactggaaaatcgtgttcaagtattgcttttaaacttaattgacctagtccaggccatgcaaagatatactcgataacaactagtccacccattatcattggtatagacatacaaaagattgataccgcaacttgtaaagcattacgcaacacatgcaacattaatgtgatagatttcacaccgcttgctcttaaataaagtacataatcttcatttaattgttccaccatcgagcgtctaacatttctaaagtaaataccagcataggcaatcgtaataacgatcactggcaatatgtaactttctggacctgttaatccagaagtcggcaatatgtttaacttcactgaaacgtaaataataagtattgaagctatccaatatgatggtaatgcagttagaaagaaagccactgaacgtatcgcacgatcagtgaactttcctctttttaatgcactaactacacctaaaataattgatgtaatcatcaccataacacttgaaattattgttaatttcaatgtgttcataaatgctgggccaatgcgttcagcaacaggatcccctgtaatgtaacttgtaccaaaattaaattgcatcgcttcaagtaaccagtttttatattgaattaataatggatcattgaaaccgtacttttcattcgtttctgcaatcaactctggtgttacatttggtgtcccttgtgcatgtaaaattgtcacagctggattttcatttgtaatatacgtcaatagaaatgtcataaaacttactacaatcactaatggaaacatgagcgcaatacgttttaagataaatttgaacatctaattgctcctttatttatactgcatttcattgaatggtaattcatactgtgattgtgtgaatgatactttttctaaatctttcggcgcaacaactgtcatactaccgtgtgaaatagggataaagataccttcatcatcaatttgtttcaaaatgtttttataagcgtctgaacgctctttaccgttttggattttaaatgcgtcatcaatgctgttgtatattttatctttgttctcaatgcctgatgttgcactttcataaccatttttcgctttaaatgctgcaatagtactttgtggatcgtacaataatccccaagtttggttgaacattaagtcataatcaccagaagtacgacgttcagcaattttatctgatgtttcgccattgatgtttaacttaatacccattttcttaaattctgcttgtaagtattctgcttgttctttttgacttgaagaacctttgtcatagtacattgccatttcaaggtttttaccatctttttgacgaacatcgctgtctttacctttcttccaaccagcttcatctaataatgattctgcttttttaaggtcatacttacgtgttggcatatcgaaattaatatctgttacatttttcgcaaataattgagttgctggtttttcttgaccatctaaaatttctttggcaattttatctctgtttaccatatgaccaatcgcttgtctgactgttttgtcactcacagcgttatcttttttaccagaattgacaactaacattttcgtattcataggttgactacgcttaacttgatagtcacctgtatctttcaattgttttaaagagtctttgtctaagctatctgtacctctatcatctgtgaaggcaaagttcgtttcaccttttttcattgataggaatgctgtttcaccagcaggcattacttttgcttgtactttgttaagtttagacttttcgccccagtattgatcatttttgttaaagtctgcagactcatcttttttgtgttcacctaatttaaatggaccagtaccatcgaactttttaacgccatcttttgttgtaccgtttttaaagtcttttggagacacaaatacatatggacgaggcatcgctaattcagccaatgcaggttgatatgcttctttcaaattcaattcaaccgtgtacttatctttaactttaacattgtcaattaatgttgaaatctttaaccaagaatgcaattttttattttgttgaaccgcatcaatatttttcttaactgcgtcagcatcaaatggtgtaccatcatggaatttaacgtcatctctcaaatggaatgtatatgtcttcccatcttcagacacatcccattttttagctagtaaaggcttaattccatctttcgtgttacgtacaagcggctcgtatatcatactttcagcagacatcgatccaccgtaaacatgcggattcatatcaccgatatctttaaccgtcgtatacgttaattgcttgttttcttttttctcctctaaacctttattaccgccacaaccagttaaaattagccctgatgcaagtaacattgcactcattttagttagttttctcatttgcttttcctctttctaaattgataagttgcattacttaatcaaatcgtaatgattatttttctcaattatttgcttatttttatgtaaatgtcaaacataattcaataatttttttctattataaaacttcaaacccttattgtgaaagcgttctattgatttccaaaaattttgtgacgagtgctttatctccttcaaatagatttgtattaaattgagaagataagtgttgatcttgatgcatatccttgtacgcctggcaacttgcttcatagcgagttaggaactgatcaatcattggcgttttgatacctagcattttcccaatatgctgaatcatcgccgttctgtaataatcttcacttggcattcttggaatttgaacaacatcctgttcatttttatagacttgcttaaatggtacagctgaaaaatcaaagtaatgtccgttttcgtctggctgtgaaaatggatcaatgaggattgcggtatatcttacataaagcagatattcttgtaagatatctggcaagatttcgaaatgctcaatatcaccttcatccaaagtttcaggacgtactggataattttccttcaccataaattgaagcaggttgactgacggcactctaaatgcttgtaaaatagccatcatttccttccacattaaacgcatttcacggattagtgtcatcgttatcggtccttcaggaaataacttatacacataaaccggtacatccgtcccttcgaaaatggctttcaatgaaaagtcattcataaatagtggtgggtgcacataaagcgaactgtttcgcgtttcagcgtgcagtggcgattcaacgacttctaattgaatcttcaattgctcagctaaagcagagattcgttgacacattgttgagtttgaatgtgtcgatcccatgtacaatttcttttttacacctgttgtcaacacatgattaggcgcttctttatcaacaatacgtgtatcgccaagataagttgaaaatgaaatcacttcgatatcctgactgaacttagacataaattgttccacaatcatttgcgatccaaatgtcggtgaaattaaaatgacatgtttgacactttgcaaagtttctaacgacaattgctgtagtgtgtcataataagcatctgctgtgcatgccatgacaaccgtttcgtattcacccttaacgtttttaacatctttatacaaacgattaatttcaaacttaccttccagatgttgatgcgcctcgttttgtattttgacttcaaattgtttctcttttttatacgcttgatataagcgttttgatttttctgatgttgaggcacgtccaaccatatcaatctcataatctgattttaaatagcaaatattcgctaattggattgcgaccggaccagtgcctatcattaataatttagacatccgtaatacctacctttatagctgcttttttataaagtgctatatcaaaaatttgctgtggtctcatatgtttattcacacattgccacttatcttccgctgtttcttgtgacggataattaaatattgctttgatgccatcaccaaagcgcattgcaactacgacattttcatttgttaaatcatataattcttctaaaatgctgtactttaaaggaattgtcgagctgaatatgatatgcgtcacatctttgatatctttaagttcagataccttttgatccgtaattgttatatcttcatttggtgctaagacgttaacgattctgcgccctaggtcaacggcttgtggatcaatatcaataccgataactgaagcacctgtttcttttgctacttgaattaacgtcattggatatgcacctgaaccaactaacaataatttgtcattgctagctatactacattgtccaaactcttcatcaatacaatgttctatattgtcaaagtaacctgtggtagacgcctgtccgtctaatagacgtctagctctaatgacttccacttgtttaacacactgcgctgtaatatattgcagtgattttattaattgtgctttttcttcaacgtcacgccaagcattaaattgttgttcataaataggatttaaaataaattcactatagtcatccatcaatgtttctaatgcttcgatatattgatcgtcttgtaatacacgctcgtaatgcgcttcaaacttttctaaatattgttgtaatatcaatttgatttcattattaaagttattcattgtaggctccttattctatatatgcttttcctgtagctacagttgtaacctgtcctttaattgaagtttgatatcccaattgatgacatcgctttgatgtcactaaaatactgccccctggctgatgtactgtaaaatctttgcatgcgtcattacgttgataattattaaaaaccccaattgatgctgtaccagaaccacagctattttcccaaattaaactttgaatttctggtatatagattaatggctgtaaaaattgacgttgttcatcaaaaagcatcatacctactgttttatatttgtgactccattgttgctcacgcacaaacgcttcaaccaaatgttgaatttctgttgttacttgtttaactggaatcacataatgtacatatgtttcataaataatttctattgctttccatgaatgattacccatattaattgttgttggcacaacacgatgggcttgtggcatttgaacttcatagtattggcaatcatgaattgcgcattgcactaaatccgaacagccagacaccttcaccttaaactgttggtctttaagcaaatgactttcttgcaaatgatgtatatatgacatcgtcgcattaccgcaaaattcattaccgctcataactaagtgaaaatcattgccatcatcattttgtgttgattctataaagcctacctgttcacaacatacatgtgttgcggccatcaactgattggcgatagatgcatattcactagcatcatgttttgaatgaacaagtatcgtcatattccccgaaggattatacttagaaaattctataacctgccgattcatacgacactcctttagatgtatttttagagcctttgtaattttaattactagaggctcttatgcagttgttgcgaagcaaacaactgtattcctctaaacctgtaattttttagaagatgaacctaatagctctatctagtaggtaagtcatgctaattcgcaaaagcgaaaaccatggctcttatgcagttggtgcgaagcaagcaactgtattcctcttaacctgtaatttttaatagaagatgaacctaatagtttcccatctattaggtaagtcatgctaacccgcaaagtggaaagcatgacttagtaatcggttgttgtatcaacatgcaaccgtaaaccttatttaaagttgcttcttgtggctctacaagcgaatgcagttgtccgttaactacattcacttagatgcttttactgttttcacctcaactaaaacttcaaaaaagttgcagaaaacaaatcgtaactattacgatttgattatatactatattagttgagaatcattgtcaataaaggttgtaaatgaatgcacatttatattttgataatccttccataaacatcgtattctcagcacattcaagtctttttgaaaatttttatcaataattgagtagaagttccgttctagtcagttcaaaattttacgtaagttgtctctgcgtattgctttagtgagaataacccacacttgtggaaacgtccttttgttaatctacaatggatacccttgtctttcgctaacatttcctattaccaatcctgtaacggattttcatcgtcaagttgttgcccatacaatacgcaccaaaaaagctttgtacaatttcgtacaaagctttaaaaatttaaataaaaatatcattgttttaatgaactagccatatcagattttatttcgtttgctaatacttgtaattcagggaagtaattattagcaaagccaattattattttattttttacaaacgtgttaatctctcgatcttctggaatcgtattttctattaaattcaaaagctcactatgacttatgttctctatacttactgtatttaaatattttaaaatcacaagatacaattcatcaaatacttcatgttcaaaatcaaagtccaataataataaactaacggaattagtttctaactgattatctccaattttatctgcaatctctcttatagcttgatatagcaatctaaaactttctttttcttttaacataaaattctccttaatttattagaatagacaaaatacagcttattttaaagatactccaaaagtttgaactcgagattctgataaattagatgcacgacctacaatacgttaaaacaagctttaagcaatacacttcaaatgaacaatatgtgattttcaaagattaattaatctccgctttaaatgtctttcattgcgacaatatgcatacattgcctacttcatgccaaattcttttccactggatatcgattttaaataattattccaatgtccgcttccacgaatcatcactcaacatctcgccaggccatgtgtaagccataacaccaccgtcaatgcgaattgtttcaccagtaataaatgaactctcatcagatgctaaaaagacaacgagcttgcctacttcttctggtttacctaaacgtcccagcggtgtcatccatttctgattttctctaaatgctttgccttccatatcttcgctagtacctgtcagtttatctactaacggggtttcaatcgtacctggtgcaatcgcattagctcgaatgccatctctaccatattcgattgcaatggatttcgtaaaattaatcactgcccctttcgcagcattatatcctgagcgatacaaatctgctgcctgtcctgaaaatgaagatgtgttaacaatagagccacctttagtcatcattaaaggtaacatcattttcgtcattaaaaatgtcccacgcatatctacattcataatcttgtcatatacatctgttggatactcatgaattctaccagccgcattatccacaccggcattattaaataacacatcaacatgcccaatctgttcctttatgtcagatacaaagtctaccacttgttgttcgcttgcaatatccacaatataagcctttgctttgtcaccattacttttaattttatcgacagtctccgataccgcttcagctatgtctaccgccaatacatacgcaccttcttgagctaaagcgattgcagaagcttgtccgatacctgtacttgctcctgttacgactgcaactttattttccaaacgtttcattcagtcactcctatacaacatatcttaaacttacagtccttattttccactgttcaatgcttcataaacctaatagataagtctccaggcagtcttaactactctatgctatacaatttctattgaataactcaaaatatttaacaatattatatttttcattttctgaaaattgttacttttgagagtattttttgttacactttaaatatttaacaaaagggggaatcattgatgacatcaaaacatcaacaaaaggggtctatcgtcaatcgtttcttgaatagtgttgaaagaattggaaataaattgccagatcctagcgtcttattctttttaatgtgtgtgggcttagccattatgacgtgggttatctcattatttaaagtatctgttaagcatccaggtacgcatcaaaccatttatattaaaaatataattagccatgatggatttacgatgataatgaatgatacgattaaaaatttctcagagttcccagcattaggcttagtactagcagtgatgattggtattggtgttgcagagaaaacaggatacttcgacaagttaatgatttctgttgtgaatcgcgcaccacgtttcttaattttaccgactattatattaattggtattttaggtagtacagcgggcgatgctgctacaattatcttgccgccgctcgcagcgatgctttttattaaaattggctatcaccctatcgctggactaacgatggcatatgcttccgctgtaggtggctttgcagcaaatatagttgttggtatgcaagatgctttggtctattcatttacagaaccggcaacacgtatcgtttcagattctattaaaacaaacgttgctatgaactggtactttatcgcagcgagtgtcgttgtattacttcctacgatattgctagttacaactaagctcattattcctagattaggaaaatatgatgacaagtttaatgcatgatgatcatgaagaaacgtcttcacatattactgacaaagaagcacatgctttaaaatgggcaaatatcagtttcatagtcacaattattttattaattattacagctattcctgaacatagttttttaagaaatgctaaaacaggcagcttactagacgatgcgccattaattaacggcgtcggattaattattcttgtcgtatttttagtacctggattagtttatgggattttaagcaaagaaattaaaaatacaaaagacttaggtaaaatgttcggcgatgctgtaggatcaatgggaacatttatcgttattgtgttttttgcagcacagctacttgcgtatttaaagtggagtaatttaggaattatcgctgctgttaaaggtgccaaattattagaacatcaaaacggtattgtattgatactaggtattattgtactgagtgcaatggtcaacatgttaatcggaagcgcatcggctaaatggggtattttaggaccgatattcgtaccaatgttaatccttatcggctttcatcccgcattcacacaagtcatttaccgtgtaggcgattcaattaccaatccaattacaccgatgatgccgtacttacctttattattaacttatgcacaaaaatacgataaacgcatgaaactcggagccttactttctagtttaatgccgtattcaatcgcgctaagtattgtgtggacagtatttgtcattatttggttcctattaggtatccctgttggaccaggtggaccgatattcgttaaataacagtattcaaagggataaattaaaatgccactatacaagatttgacctgtatagtggcatgatttgttatgatatagcgttcgagatgaaactctgtatttatatgaagaattatagtttatcactaataatatttagcctgttccaaccgttaatttggtttacaacaaagacaagatcaataatttgttcttcatcataaaatgattttagccggtcaataatttcaaacttcttaaagtctttgattgaatttaacatttctgcaaattcaagcgtcactttttcttgatcagtaaataaatctaaatgtctaaaactcaagacttcatcaattttcatttgtgttacacccaattcctttaattcttttttatggatatcaacacaataatgacaaccgttaatttttgaaattaataacttaatcaatgcactaagttcatcattaacgggtgattgatgaataaacttttcaccttggctcattacagacattaactctccattttgtttcttgtaattatacggcatttgcaatctctcctttacattgtttaataccaatccagtgatactacacttcgaacaatattggatagaatttaaaattctgtataacatcttgtcaatctgtgctttagttaaaacatttagcgcttatatttaaaaaatatataaaatatgaaaacagattgaaaggatattataccttgctctacccttttttataaaaaatcacacacatttgagaaaatttgataatgtcaataaatcacgtcatcgacattgttatttggtatatattgttcttataatggccaaactattatttcatttacattaatggggttcacttgtgttaatgtactgtaaaaaactggggaagtattggtgatgatgaagtgatttatattaattgcgaaacaccttcgatagcaatgacatagattattggaagattaaatcaaaaataaagaagaccctagtggccttcttttttatctaattcttctttgattttttctggtgattttctttcatgtgctggttttaataatttatctactccttcactttttatcatagcgccaccaaattgataattatgttcaggcgatgcataagcagtaaaatcatcttctttattttcattgatgtatccttcaatcacagcacttcccataggacttgtttccaagtttgtgaaatgtacagatttaatcgtgttcgtttctttagtattatgcttaagatagagtgtaatacgttcttgttgttctttgtagtaaatcgctttttgtttttctttttcatcatatttcattttaaaatgcatgaccgtagaaactgtacatatacacaatatgacaccaataattataaaaacatgttttttggacattaaagtaactcctaactttagtgactcttctttttatttagttctttttttatatcatctggtgattttaactgattggctggctttagtaactcgcttaatttttcactttctatcatagcaccaccaaattgataattatgttctggtgtagcataagcagtaaaattatcttttttgttttcatttatgtaaccttcaatcacagcacttcccataggacttgtttccgagtttgtgaaatgtacagatttgattgtattcggttctttagtgttatgcttgagataaagtgtaatgcgcgcttgttgttctttatagtatattgctttttgtttttctttttcgtcatatttcacttttaaatagatacctgcaacactaattaatatgattaacataatactagttaatattaaaattttctttttcgacatctatcaccagctcctaaaatgtggtggaattttatacagtttacatatttatgatactacaaaacacactcttacaaagaaaatctataattttaatctaggtcaaggaaaagcagccaaaagtgtttatataagatcaacgaaatattgcgggtataaagtggttaacagataaatacagtggaaattgtactaaaaattcaacttttcatttttatatgtaagtatgattaacttgaaaacaaaattaaaacggccgcatagttttagcggtcgttctttttagactctaattccttttttatctcatcaggtgatttggtttgatgtactggttttaataatgtgcttaaatttttacttttgattaaacttccaccaaattgataattatgttctggagacccatatgcaacaaaatcatcttctttattttcattgatgtaaccttcaattacggcatcgcccataggtcctgtctttaaacttgtaaaatgcacagatttgatggtattgggttctttggtattatgctggagatagagtgtaatacgctcctgttgttctttgtagtaaagtgctttttgtttttctttttcgtcatatttcacttttaaataaatgactgtagcaactatacatatacataatatgacaccaataattataaaaatatgttttttgttcattaaagtaactcctaaaatgtggtggaaaatgaaaaaatttttgtaatctataattatgaacattacagattataaaccataacactaacatcgccccattcattaactcgattgttaaaatcaccagttagtgaaaattgtgcaaggaataattgcctatcatgcttttatatcattattgccttactaatattaacaaaaccgatatttattacattaaatgcctatatcccatacctcaaacacatttttatacaggacgcactgtaatttcattcacgttaacgtgctttggttgtgttaatgcatataatactgcttctgcaatatcttgtggttcaagttttttacgatctgttggattgtatgcggcagttatggctgtatctaccattcctggagaaatgcttgttactttaacgcctgtctttgccaactctttttctaatccttgagtaatagtgtgaactgctgctttcgtcgcactataaatcgtactgcttttcgttacttcaaagccagaaatagatgcaatgttaataagatgaccacttgattgttctaacatagttggtaatgcagcctgtgccgtatataaagtgcctttgatattcacatcaatcatactatcccactcatctacttgataatcagtaatcttagacgataacatttgtcccgcactattgataacaatatccaaaccaccgaatgtttgttgtgcaatttttatcaattcatcgacttcttcttttttcgttacatctgttggcactaccttcacactatcttgagctaattgattcgccacattttgtagtttatctttatttctaccggctaagatgactttcacaccctcttcatgtagtaatgttgcaattgcttctccaataccactacctgcacctgtaactactgctattttatctgttaatactgtcataatgatcgactcctttgattctttttattttttcagggtaaatcataaatacatattacttttaaaaagcgtatcacaattcatataacggtcataataactcgcttcattttcgttaataaagtatattccaagccattcgaaatatacaattaatcgttgcttatattttttatttttaaaaatgttgaaaaatcgtcacttctttattgtaaaaacattatattagtactaaagttaatactgtgatttatcattcgattgaatgattagagggaggaataaaacatgacatatcatgagcgtgttttagcattaagagcagaaagtaaaagaaccgcatttgattttcgattcgaagatttatttagcaaagaagaatggctaagtatgtctcttgcagaaagacaaaaagctgaaaaagcatttcgacacgaagttaaaaatatggacgatgtaagaatgcccttctcaagtgtccatgacgcccaagtaaaattatataatgttgtatattcttataacggcatcaaacgtaattttaaacaagttgaaaatgaaggattctaatatcatttcgtttatatatagcagacatgatagaattttatatgtaaatcttgtaggtaatcgttttaaaaataatataagcatgactaaagccacatccaatataggacgtggcttttagtatcgttccagatttgtggggagttagggtttacttaattaaaggggtctgccctcaattgctcaccaacgagggcaagttacatcaatcacacttcaattgccgccgactaggggtagtaatcattggcaataagaactagttagtgactaacgatttacgttccatagcaaagtgatacaaacgctcagcatcaatgtaaggcatagaatcaatagttaggtaaccatctttgatgtcaccaattaatccttgatttacaccagtgttcacgtaaatatcatagctacttacgtctgagaaaataagcgcttcaatctcttttctcataatcatcactccaatgtttatataaactctctcgtctctctctatttattaacttcttacaagtctaatattacatgaatttccaaataaataaaggggtttgtgatgtatttcacaaatttatcactattttggaaaattaagaaatatttaattatataaaagtttaataagtaagaaaatatgataaaatgtagatgttctttagacattaaaagcttctaacatgatacggaatatgaggttcctgtatcacattagaagcttttttgttgtagtgattatattgataatggcatgaatgaacacaagctgtcttagtttcaggaatcggctagaatattaaacttccgttctttgaatattttttaatttcttactaatatcatccagttcattcttcgcctttttaacccaatctccttgagctacattatcaaattcacctttaaattttttgaaatggctacctatatttcacagctcactttagatatcgaacttgtttcttcagagttacttgttatattaccaggttttatttgatattcagtttgactcataacttgtatcctcacttggagtatattgtacagaatctgtaaaataaatgttttcttctttattttctacaaaggtaaattctagattttttgaccctacagatgagccttttaaatcaccatcaccttttattaataatttcggagctttgttggttggaatattatatctttttcgaagttgcttcacattgtagtcatcgtttttcaattgatattttgcggaataacttggaacattaggattatatgaaatgtcaccatctttataatcattaatatctttaaagtcaccgtattgtacaaaaaacttaaagtcttcaatttcattttttaacttgtcattcggtagtggcttcgttggtatgattttattatgttccatttttaccggataccttttttcatcatcctttggtctgccgttactgtcatctgtcatttcacttataaaataatacccttttgtggttctagtattgcgattgatatagagcaccattcctctcgtttccatatccttaccttttggctcgattaccatttcagaattaactatccaagtacctttatcaccctttttaaattcttgatctcgaaagccttctttatcgtaaaaatcatcgagatttttggttggatataattttaatgtttgattaaatgtgtctttaatttgggcgtttcgaccatttgtttttgtcataatgacataacctacaatcaatataatgagtaataccaagcatataccgagcgttaatttctttgaatgaatcatcatttctccaccttatatttttaatattgactcagtttttaatatttacaactaaagcgaaaaattattttgaacactttatgaaatttttatttcaaacttctattaaccctattcagtaggtttgaaattaatactatcagaaaaatacacattttcttctttatttcttataaagttaaattctagttctttagaacctacggatgagccttttaatcgccatcaccttcatacagtttgaagtcatatttaccaattgtaaatgacgactagatgatatatagttcaagaaacatcaaaattcgttaaaacataatcaaattttattatgttcaaaactttattttccaaaaaataaaaaagaagttaaacaaagattggttgcttaacttccattattgaattcattagtccgatttgacaaagatcccgaaaaataatggctaatagccacttatagtcgaaattatgaactatataatttatttattattaaatggattatatagttattgtgtttcttaatacctttttatactttaatatcttgaattttttctaaatcattactaatatcttttaattcgtctgtggcatttttcacccaagccccttgtgccgcatttttaaaatcatcttcaaagtttttgaaatgacttaccatttggtcaagtaatattttctcatcacttttcagcttattttgatgatcatgatgcatacgaacatgttcaggcgcaataacctcactaatctgttctttttccttcatttgttccaatactgctaaatctggtaaaccactaaaatcaagtcccacgcttattcatctccttcaattctgtcagattgttttagatattctcttcttaactcatctttataatcttctaatttcatttcgtgatgtcggatacgttgattcgtttctctatcgaaagattctataatacgtgtcatcctgatcatagcgtcttcactataattcattttatgtttgagatataagaaatgatcatacatttgttcacatttcttgcgtgtttgatgtcttaattcatcaatttgattgaatgcatcattcaattgttttctttcttcatcataggcattttcaagttcattaatatttttatacgtagtaaacattacatcatcccatcaatctggctcgctaacatttggtcattagaaacaattgcttcgatactctgtttaatttttgcgatatagccattacaatttttataaacatcatttaatttctttatcttatcatcaatttttcttttgggatctgtttcaagtttactttcatacgcgccaccttttcttaattcatctataacctcttcagaggttaatttttcaccaatttcatttccaacttcttgcgcttttttccagttgtctccaaatttatgtgccatcgcgtgatacatttttttcaaatgttggctttcttcattcactaattgatttaagccttcgacaatggttagtgctgttaaagcttctaataattgttgttgggaggaagagagtgatccacccgttgtttgaatccaattcgctcttaacgtctctactttatgtaatctatgcctcgtttgtttacgaacggattttaatgctttattattttcgtcttggtagcctttaactttgtttaattcagctaagattatagcctgtgttctgctcattaaaataccactcattgcatggccttctccatttttaagtactattttttctccagcagtttcatataaatgattgcggacacctgcatctaattcgtcttcatcagacacaaatcttacaatgtgaccatcgtacttttcaatcaattttttaagttcttcttgatcggcataaaggccgctcacatctttgatcgctaatggtgctggattatacacaacgatatgtttaatatcattactcatacctaaaatcatcgcatctctaccgcccagcgaatgtccggtaataatatcaatatcatagtcttttttgatatttttgataaagtcttgggtatttttataatgtggatctttatctgtgacggaatgaaggccaatattgacatcggccccaatatcctttagcgtttcactcgcatctatatatccttgataagaaggaacaccaaatgtttgttttaatattgcgtctttgtgtacattagtacctgtcatacctaaagtaactttgccagtgtctttatttaaaaaggcgcttgtagtcgtacctgttttggggtccgtataacttttaagatatgaaagatttttagggaaactattttgtgattttaatatttctatttgcgtttgaatacttgcattatttaaatcgttattatttgcgttttctatttcataacttatactagatattgcgcttgtttcttcagagttactctttatattgtcagaatttatttgatatttagttttgttcatgattcatttcctcagtaggtttgaaattaataccatcagaaaaatacacattttcctctttatttcttacaaagttaaattctagttctttagaacctacggatgagccttttaaatcgccagatcctctcaattttaattcaggtgcccttttggttgatatatcatatcgttttcttaattgttggacattataatcatcattattcaattgatactttgcggaataacttggtacgttaggattgtatgaaatatccccatctttataatctttaaaatctttaaaattcccatattgtacaaagaacttaaagttttcaatctctttttttaacttctcgtccgttatgggcttcgttggaattattcgattacgttccatcttgacagggtattttttatctttattatgaacgtatccttttttgtcttctgttgtctcacttattaaaaaatatcccttagctgttctagtgttacgattgatgtaaagtaccatcgctctggattttaaggctcctccttttaattggatgtacattccagaattaataatccaagtccctttatctcttttatcaaattcttgatctcgaaagccttccttatcgtaaaaatcatcaagattcttggttggatacacatttaatgtttgattaaatgtgtctttaatttgggcgtttcgactatttatttttgtcataatgatacaacctccaatcaatataatgagtaataccaaacatataccgagcgttaatttttttgaatgaatcatcatttctccaccttatatttataattctgactcagtttttaatatttacaactaaaacgaaaaattgttttgaacaaatgaatttaattgtaattattttgtattttaaatcttcttatcagaattataaaacaattaaatcaaaagataaagtttctgtgatttattattaattttaagagttatcgttataatcttttacctagtgctttatggaattttcattccaaacttctattaaccctattcagtaggtttgaaattaatactatcagaaaaataaatgttctcttctttattttctacaaaggtaaattctagattttttgatcctattgatgaaccttttaaatcaccatcacctttcaataatagtttcggagctttgttggttggaatattatatctttttcgaagttgcttcacattgtaatcatcgtttttcaattgatattttgcggaataacttggaacattaggattatatgaaatgtcaccatctttataatcattaatatctttaaagtcaccgtattgtacaaagaatttaaagttttctatttcttttcttaatttatcatcagctatcggtttcgttgggataattcgattatgttccattttcactggatattttgtatctttactttgtgcataccctttactatcttcccacaattctctaacaataaaattacctttcgttgttctagtattacgatttatatagagcaccatacttctagattccatttttttatccttcagctcaattaccatctcagaatcaacaatccaattgcctttgtcgcccttttcaaactcttgatctcgaaagccttccttatcataaaagtcttcaagatttttagttggatacaggctcaacgttttgttgaagttttctttaatttgtttatctttactactttcttcttttttcattccgcaagcgcctataaaaacagatagtattatcaggcatagacacaattttaacctttttgaatgaatcatcatttctccaccttatatttttaatactgactcaatctttaatttatacatttaaagcgaaaaattttttaacactttatgaaattttcaatccaaacttctattaaccctatttagtttgactcataacttgtatcctcgcttggagtaaattcaaccgaatctgtaaaatagatattctctcttttattttgtacaaaggtaaattctaagtctttagagcctatggatgaaccttttaaatcgccatcacctttcaacaatagttctggtgcttttttagtcggtatatcatatctttttcttaattgttggatattataatcatcattacttaattgatattttgccgaataacttggtacgtttggattgtatgaaatatccccatttttataatctttgaaatctttaaagttgccatattgtacaaaaaacttgaagttttcaatttctttttttaacttctcatcttttataggttttgttgggataatttgattatgttccatcttgacaggatattttttatctttatcatgtgtatatccctttttatctttagttatctcccctactataaaatatcctttcgttgttctagtgttacgattgatgtaaagtatcatctctctggattttaaggctcccccttttaattggatgttcattccagaattaataatccaagtccctttatctcttttatcaaattcttgatctcgaaagccttccttatcataaaagtcttcaagatttttggttggatataattttaatgtttgattaaatgtgtctttaatttgggcgtttcgaccatttgtttttgtcataatgacataacctacaatcaatataatgagtaataccaagcatataccgagcgttaatttctttgaatgcatcatcatttctccaccttatatttttaatactgactcaatctttaatttacacaactaaagcgaaaaattattttgaacactttatgaaattttcatttcaaacttctattaaccctattcagtaggtttgaaattaatactatccgtaaaatagatgttttcttctttattttctataaatgtaaactctaaatttttgtgtcctatagatgatccttttaaatcaccatcgccttttattaataatttaggtgctttcttagttggtatatcatacctctttctaagttgcttcacattgtaatcatcgtttttcaattgatattttgcggaataacttggaacattaggattatatgaaatgtcaccatctttataatcattaatatctttaaagtcaccgtattgtacaaagaatttaaagttttctatttcttttcttaatttatcatcagctatcggtttggttgggataattttattatgttccatttttactggatattctttttctttactacgtgagtatccttttttatcttcccataattccctcacaataaattcaccttttgtcgttctggtattgcggtctacatacaggaccaagcctctggattccatattctttccatttgtttctattgtcattttagagtgaattatccaagtgcctttgtcgcccttttcaaactcttgatctcgaaagccttccttatcataaaagtcttcaagatttttagttggatacaggctcaacgttttgttgaagttttctttaatttgtttatctttactgctttcttcctttttcattccgcaagcccctataaaaacagctaataatactaaatacagccagagcctcaacctttttgagtgaatcatcatttcacatccccatttttatttttgatgcaaagttaagttcaaattccaattttaataatactagaggaaattttatgattaaatcctcgtggattttaattgttagttgtatttttcacatatcaacatcacaaattatttaaaaagcgcaaatatctttataatttttattggcctaaccaactaattaattaagataaattgcgcttatatttaaaataataacactgaaactcaatgtatttacttattaaaattgatgtttaaatacaactttactaacattcatttttcggtttacattaatttgttagataacgatatatatcatctcttacagctttatccagtgctaaatccatcgttactacgtttgaaccattcggcattttatcttgcttttctgaaccttctatatatccagcagttcctaaataataaaaatatataccatcatcatcttttttctgtacaaaaatatacattttaattccttttgctctatgggacaaaattttctgaacttcttttgattttagcgttctattagatttagtaaaccattttaattcatcttgacttaaaaattcatcttcatattttgtgctatcacttatatcctcatgcttatcataagtgataaatattggcatttcttggcttcttatcatgtatcccatgattacagacgaaccatttttattccaattaaatattttgctaaaatcttctcttgaatatttattatataaaatcagtccatttttacctttttggtatttttcattgttatactttgataattcaataagatcttctaaaaatattttaaatgtttgattacttagagcattagtaaatgcatcgcttagtcttatcattctttcattacgttctataatgggacttccatagattttttcaattcctgcgttgtaaaatgaaaaatctaaaattcttaatgaagtatctatatcctcttctgttatatccttaacttcgttcaacattttattttttaattcatcatatgttaattcattttttaaaagttcttctaaaactaaactatcgattcttttcaatccaggtgctatttgccttgaaaagaaaaccagatttttagattcattttccgtcaataatgtatctatttttttatatctcactaagaactcgtaataattactaaatttagaaaatataacgcttggatctatagaatgttgttgtatgaaatccattagtaacggcatgtgtcccaatctattttcaacttcttcataagcttttaatattaatttattttgatttaatgatactgcatccaatgaattgtaaatctgttttttagcaacttcttcaaaattaattgtagatactccattaatcgaatcgttattcgttaaaaacttcttataattatctttattttgcgattgatccccagaaagcgcaatcggaattaaataatttgtcttataattaccaataaaatcaattactgtaacatactctttatttgaactttttcttaatcctctaccaagttgctgaatgaatataatactagactctgttggtctcaacattacaacttgattgacttctggaatatcaataccttcgttaaaaagatctacagttataatatagttaatcttaccttcttttaatttttctattacaatttggcgataattaacactatcatctcctgttaaagcaacacttttaatcccttttgaacttagtttatccgctaaatcataagcttcttttttgctactcacaaaaattaatccttgtaaaatttcacctgaatatccatagtaatctgtcttttgaataatataattaactctttcatcagaagttaaatatctcagtttagttacatcatcttctttaataccttgatgtacataatcagtcacaccaaaataatgaaatggacataaaatatcactttctaatgctgcttgtaaccttatttcatacgcaatattataatcaaacagttcaaatatacttaattcatctgatctttctggtgttgcagtcattcccagcatgaacttaggtttgaagtagttaaatactcgttgataagtagatgcagcagaacgatgtgcttcatcaaaaacaatataatcaaattcattttcatcaaattgcttaaaattatcatctctagataatgtttgaatggttgcaaataaatatttggcatcgacatctctatgttttcctgtcaacaatccaaaatcactatcattttttataggtaatacttttttaaattcttccttagctctatttaaaatcccctcattatgaacaataaataaaaatttattagggtttacttctctaacatctaatgcacataaaatcgttttacctgtaccagttgcagatattattaacgccttatctttggctttatccctaatagcttttaatgaccttaatgcttctgcttgcattaaattgggtacaatttccactgattttttcaccttatcagctagcagcatttgagtttgttcaacctccgctaatttttctaaggagcggtactcaaatgattctttatatgatttaatccattgctgagtcagtggggtactcttttgccataacaattcaaattcattttttacactatcaactaaatcgccatttttcatagtagacagtaaaacattatgctcataattaacctttaacgcattagatgttaaattagagcttcctattaccatagaactataatccttatgttcaaaaatatatcctttggcatggaatccagcaatatcagttaatcttacctctacattttttaatttaagtaattctccatacattttaggactattaaatcctaagtaattagatgttaatattttccctttaacacccttattgcttaaatctaatagttgagcctttaagctggctaatccgctttctgttataaaagctacagaaaaatagaacgtttcacatttttgaagttcatctataattgttgaaaggactttttcatttttattatttactaaaagcttcggtgtataattccctttatgagaaatatctttgtctataaaacctttttttaaagattgattgaaatcatttagtaatctactcatattatccctcagtcataattttattaacggctggtatatccgctggggcccaatttaatttatcaagttcgtttattgacaaccattcaatactcttatgttcagttaaagttggtaactctttgtttaaagtacatttgtatgttgttaacttaacaatgccaaaatcatattcatgttctgtagttatgactttgtctccaacaattagatcacatttcatttcttctctaatttctctgatcaaagcttctttttcagtttcattcttttcaatcttaccgccaggaaattcccacattaaaggtagactcatttcttcacttctctgtgcacaaagaattttgttatcagaaaaaataatagctcctactacattgattacttttttcataagactcacccttcaatttaaaatcatcttaattgttattctatcaaaaattacaaaactatatataaatcaatattaaaaattaatattttacaatttcctgcatgatatatcactcttacatctactccatgcattttcatacacatctattatataatacttgtgaaaagtattgtcttggggctgtgtttttttacttttgggacgtatttctttataattcattacataaatgtaagggctttagttttcatgttttattaagtctaactgagattttgaaaggatgtttagcaacaatggataaagaattatggatagaaagagctaatgatagtttagttaaacatttttatgagcagcaatctgacattgaacagcgagaaggttttgaaagtaaattaacatttggtactgcgggtatacgcggaaaattcggtcttggtgaaggtcgacttaataagtttactattgaaaaattggcattaggtttatcgcgttatttaaatgcacaaacaaacaatccaacaatagtcattcattatgatattagacatctttcaactgaattcgcccaaattattgctaatgtattagcaaaccatcaaataacagtttatttacctgatacatataaaacgacaccggaattatcgttcgcggtgcgcaatcttaatactactgctggcattatgattacagcaagtcataatccgaaagactataacggcattaaagtatatggttctgatggcgcgcaactatcaactgatgcatctgagcttgcaagtcgttatatcgaagaagttggcgatccattacagattgacataccttcttcaaaacaaaatacatcttatatcaagccatttccgaaatctgtaactgatgactatatgaaacacattcaaaatatgattggctatattcctaaatctgatttacaagttgtgttcactagtttacatggtacaagtgttccgattgtacctgagttattaaaatctttgaatttcaatcaatttaatcttgtagaagcacaatgtaaacctgatccgaattttagctcagttcaaagtgctaatcctgaagatcatcgcgcttttgatcaagcagtcgaacttgcaaataagagtcatgcagacttattaatatcaactgaccctgatgcggatcgtcttggcattgctgaacgtgatgcacatggtcatatcacgtattttaatggcaatcaaattggtgcgctgttacttaattatcgtattcaacaaacgtctcaattacgtcaccgcttaatgattcaatctattgtaagtagtgagttaacaaagtcattagcacgctataataatgttgaatacaaagaggtgctgacgggctttaaatttattgctcaggaaataagacaactggatgatcatcaaaatatgattttcgcatttgaagagagttacggttttctatcagagccttttgtacgtgataaagatgccgtacaaattgtgccactcattataaaatacgcttctgagttaaaattatatggcaaaacattgaaagatgaattagaacagatttatcaaactgttggtagacatgaggatacattattctcgcatacgctagaaggattagaaggtaagaaaaaaattgaatcaattatgacacatttccgttcaaatccaccgcaagagattcagggactgaaagtgaaagcaattgaagattatttaactagcgaggtttatcatttggataaagacacaacgtcgcagattaattctcctaaatcaaatgttattcgtgtcttatttgacgaaggatttatcgctttacgtccttctggtactgaacctaaaattaaattatatgtgtcgttaaaatgtccgaattttgatgatgtagctcaaaaaattaatgcgatgatttttagctaattaaaaattttaaacatcgaaatattacatttcattttatacttatcagcccttttgaaactagaatccttatgttttcgcgttttgaaggggctaatttgtaataatttttcaaaagtatattagaaaattaattttcatgtatttttcatattaagcggtaataatataataattaataccgcgacctatttaattgttttcgcgatgaaaaaggtttagaattacaaaaataactattttaaatttagttacaaatatattttagaaaggatgtgaaataatgaaaggctctaaacaaatacttttgattatgggcattatatctcttattgttttatttatttttacactattcatcatggcgcaatatgcaaaacattatgaacaaaaatccgacagttccaacgcacatactttaaattcatcatcagccataattgagcaacatactatgtcgaatttagcgtctctagatttatacgctcctgttcgtaacattacttctagtcgtgatattcatcccatttatttcatgacaaaagattaaaacttcctttttcataaccccattcattcaactaataaattaaaaaatgataaaaacgtactgttttttagaaacatacatatataagaaacgcatccattactaaaagacagtacattatattctatcaggaaggtgcaacaatgaccgtcaacatcgtagtttctatcgtgttctgtatcagtatggttatattaggcatttatgtcgcaataactaaagatttcacactaatctcttatataaatcaaacgaccattgcagataaacacaagaatcaaattgcatatatatttgcgctatgtatcagtttgagtgcagtatttttaatgtctgcaattctatgctttgaatatgattttattgcattggcattcttatttttaacgatagcattattacttatcgcattattctacgtttgcttttataaaattacaaaatacccgtaaatggttgtgatagtgtgttggttagatttaatggtgcgctgtcagtaagtaattgtttgcgaaaaaatacaaccttgtacgaatacaaagttgcattaatatagaatcatttatgctttttaatatcacaaaacaaattgattaaactagctaaaatagtcaaaattggaatcaagattacataaatatcataacctctagatattagtatacataatataattagcgaccctattataattgctaaattataagccaaactaattttatatttcatttcaattcccaccttaatagcattgattaaaattctattatgtttacatagacttcttaacaaactttaacccagctaagctaagcattgaaataattgcacctcctgatataaatatattacttaagcttagtaaaggtataattaaacttataagtcctaaagacaatgtatccgctgcgtaattcgatgtagatgagatactaaatactttccccatcaaatgatttggcgtttttatttgaatggcaactgatcttgttagtccctctatagattgtccaagtcccaataatgttgcacctatatataatatcgccacacttggaaacacattaataatcgataagccaattccccaaactaaaacaccaatactaaatttaaagattaatcgcttttctgacagcaaacccataatcaatgacattaataaagatgctatacctaaacatgatgtagctagtccatatacaccaacgccctcttttaatatattggaaataaacaatggtaatacaacacgccaaaggccagtattaatcaatatgcaggcaaattggatgattataataaatggaatttctttagattgtttcaagaattcccaagtttcagaaaaatcttcttttgagtgtctatcaatcatgttgttatttgtatattttaaaagtgcattaaaaataaatcctaaaaatagcaatatactacaaataaaaaagacgccaacattaccaactagtattacaatgacaccaattaaagcaggtaaaataatatttgagcctctttgcaaactatcgattaacgcattacttgttgctaaatgctcctcatcaataatttcaggaagaattgccctaaacgcaggatccgtatagcagttaataatggtgatagctgtagatatggttagaagcgtcagataatttaaatttgatgttattgcaagtaaaggaataattattataatcaaacttagtataagatcagatagataaagtattttctttttattatgtttatcagaatatgcgccaccgaaaataccaaatataataaatggaagtgtttgactcataaccatcattgataattttaaagatgattggtttgtcaattcaacagtaaaccaaattatttgtaacgaaaacagcacaaaacaactccgacgtaagaaattaccaatcaataaatatgtaaagtttctatttttcaaaacttctaagtacaacatatttatcacctctcataaaaataattgaatgcatccaccagcctttttagaccttcttctaaactctctttatccaaagcgcaattaattctaatataatttagtcagttaaatatcaattatttcgaaatatacatactacttgaaacaccatacataacccccaaaatgactactcagaggttatattctactaattatgattatattaaatatgaaaatattatcaaaaaaatcaaatttataacaaaaatacaccccttaaagttaggtctttcaatccaacttttggggtgtatatcattctcatcatattctaggttgtttttaacaaactaaatatagtgaatgcaaatcaactattatttaaattatgaattattttaattctttcttctacgagccaataacattaatccagcaattccaattatactactaaagatcaatcctttttgtgtgctttctgcacctgtttttggtaattctgctcgttttttctcttgattagctactgattttttagcaattttagattttttaactttatcatttttatccattgaatgaactggttcatttggttttgctctgtctttcgataatcctggattgtcaggatttactgggccacttggatgagttggtctgctcggcttctctgggttttcaggtccttttggatcttttggtttctcgccaccaaactctacaatcttatctactggttgttttgtaatctcttctgttggttgaccctcgccaactttttcacctgttaatgggttcactgtgattggtgttgtgattgtcttacttcctggttgtccctcttgtttcactcgctcttcaccaggttgtaacttcggattaaattcacgttttgtttcaaacggtatctctactgtttttgtttctggtgtacccgtttttggtccgtgtttaatcacatcatccactggctcttcgatcacttttcctgtgtctggattcttgattcctggtttacctggtactttttccgtttgatctgttggtaagtttggatcaaagatatctttatgaccttgcggtattttctcgccaccgaactctacaatcttatctactggttgttttgtgatctcttctgttggttgaccctcgccaactttttcacctgttaatgggttcactgtgattggtgttgtgattgtcttacttcctggttgtccctcttgtttcactcgctcttcaccaggttgtaacttcggattaaattcacgttttgtttcaaacggtatctctactgtttttgtttctggtgtacccgtttttggtccgtgtttaatcacatcatccactggctcttcgatcacttttcctgtgtctggattcttgattcctggtttacctggtactttttccgtttgatctgttggtaagtttggatcaaagatatctttatgaccttgcggtattttctcgccaccgaactctacaatcttatctactggttgttttgtgatctcttctgttggttgaccctcgccaactttttcacctgttaatgggttcactgtgattggtgttgtgattgtcttacttcctggttgtccctcttgtttcactcgctcttcaccaggttgtaacttcggattaaattcacgttttgtttcaaacggtatctctactgtttttgtttctggtgtacccgtttttggtccgtgtttaatcacatcatccactggctcttcgatcacttttcctgtgtctggattcttgattcctggtttacctggtactttttccgtttgatctgttggtaagtttggatcaaagatatctttatgaccttgcggtattttctcgccaccgaactctacaatcttatctactggttgttttgtgatctcttctgttggttgaccctcgccaactttttcacctgttaatgggttcactgtgattggtgttgtgattgtcttacttcctggttgtccctcttgtttcactcgctcttcaccaggttgtaacttcggattaaattcacgttttgtttcaaacggtatctctactgtttttgtttctggtgtacccgtttttggtccgtgtttaatcacatcatccactggctcttcgatcacttttcctgtgtctggattcttgattcctggtttacctggtactttttccgtttgatctgttggtaagtttggatcaaagatatctttatgaccttgcggtattttctcgccaccgaactctacaatcttatctactggttgttttgtgatctcttctgttggttgaccctcgccaactttttcacctgttaatgggttcactgtgattggtgttgtgattgtcttacttcctggttgtccctcttgtttcactcgctcttcaccaggttgtaacttcggattaaattcacgttttgtttcaaacggtatctctactgtttttgtttctggtgtacccgtttttggtccgtgtttaatcacatcatccactggctcttcgatcacttttcctgtgtctggattcttgattcctggtttacctggtactttttccgtttgatctgttggtaagtttggatcaaagatatctttatgaccttgcggtattttctcgccaccgaactctacaatcttatctactggttgttttgtgatctcttctgttggttgaccctcgccaactttttcacctgttaatgggttcactgtgattggtgttgtgattgtcttacttcctggttgtccctcttgtttcactcgctcttcaccaggttgtaacttcggattaaattcacgttttgtttcaaacggtatctctactgtttttgtttctggtgtacccgtttttggtccgtgtttaatcacatcatccactggctcttcgatcacttttcctgtgtctggattcttgattcctggtttacctggtactttttccgtttgatctgttggtaagtttggatcaaagatatctttatgaccttgcggtattttctcgccaccgaactctacaatcttatctactggttgttttgtgatctcttctgttggttgaccctcgccaactttttcacctgttaatgggttcactgtgattggtgttgtgattgtcttacttcctggttgtccctcttgtttcactcgctcttcaccaggttgtaacttcggattaaattcacgttttgtttcaaacggtatctctactgtttttgtttctggtgtacccgtttttggtccgtgtttaatcacatcatccactggctcttcgatcacttttcctgtgtctggattcttgattcctggtttacctggtactttttccgtttgatctgttggtaagtttggatcaaagatatctttatgaccttgcggtattttctcgccaccgaactctacaatcttatctactggttgttttgtgatctcttctgttggttgaccctcgccaactttttcacctgttaatgggttcactgtgattggtgttgtgattgtcttacttcctggttgtccctcttgtttcactcgctcttcaccaggttgtaacttcggattaaattcacgttttgtttcaaacggtatctctactgtttttgtttctggtgtacccgtttttggtccgtgtttaatcacatcatccactggctcttcgatcacttttcctgtgtctggattcttgattcctggtttacctggtactttttccgtttgatctgttggtaagtttggatcaaagatatctttatgaccttgcggtattttctcgccaccgaactctacaatcttatctactggttgttttgtgatctcttctgttggttgaccctcgccaactttttcacctgttaatgggttcactgtgattggtgttgtgattgtcttacttcctggttgtccctcttgtttcactcgctcttcaccaggttgtaacttcggattaaattcacgttttgtttcaaacggtatctctactgtttttgtttctggtgtacccgtttttggtccgtgtttaatcacatcatccactggctcttcgatcacttttcctgtgtctggattcttgattcctggtttacctggtactttttccgtttgatctgttggtaagtttggatcaaagatatctttatgaccttgcggtattttctcgccaccgaactctacaatcttatctactggttgttttgtgatctcttctgttggttgaccctcgccaactttttcacctgttaatgggttcactgtgattggtgttgtgattgtcttacttcctggttgtccctcttgtttcactcgctcttcaccaggttgtaacttcggattaaattcacgttttgtttcaaacggtatctctactgtttttatttctgttttcttaactagattaggcgttagtttaaatgttgagttatttaaatccgttctcatccaaccatttgcatatacaccttgagatgttccctgtctttgactagaagtaattaaaaagttatatgcttcagatttatccaatcccaaatctgatatattagcttcccaaactttaccagcatattcggctctcattatccccgatttttcattgtacgctaattttaaattattaagtaattgaccatggaattttccatctgttgtatcaatagaattatctgcatattggaatgaattatccgctttacctcttgttggtatgtttgttccaacctttgctgtagttccatcagcacctgtttttacaaacgtaccataccctttaaatccttgtcctgcctgtttctcttctttatccatgggatctttaaaattataccctgtatcaattttaaatcctgctgaattttccattcctttgggacctaatatacctcccttttgtaaatattcgttaccgtcacctttactaaataagaacccccatccatcagcgccagttgttaccgattgatgattattagctactctaatgttaaactcaaagtcatttttaaaagaaactttattctttaattgtaatgctcctgtcaattcgttttttccaatacttttattattgaaacgagtgacttcagatacctttagatcctctggattgctttgtatatcaacacttccgtaaccttcaaaatgttctttaccttgaattgtaattggggtagattcaactacatttttagaatctcttgtaatatcaaaagagccttcatcaacagaacgagcttttctaaccttaggtgtctctgcgttatgagtgactgacgatttcggctgaacttcagcaacatcagctacttcttttggtgtatcctccttttttgatatatcttcagcttttactgatggttcatgttcgattgtgtctttgtttgaagttacttcagatttagcttctacaccctgtggtgcagtgtctttgtttgttacttcttcaatcttcacttcttttgattggacattatcttttaatgtagttggattctcaatattgttttcagctgcttctgcctcttgttgagttcccaaatacattagtgagccaattaaaatagatgctgttccaactgtaaattttcttattgaatatttattcaatttatttgatagaaaatctactcttttatttaccggtcctttcttatctctcatttgcatactcctttttccatattttccactttacttacagtgaatttacatgtaattttacaaatacaataggagttgcacaatggaatataacacttatctttataaaattattttatatattgacacacttaaaacaatctacaaataaaattattatttttagttttcaatgaataattcattcttatctgttggaaaaacccatcaactcaatagcattgaatttctaaaataaaaaataccttaacgcatttaaaaatacatttaactgcaccaagatattaaaatctcgaaacatactttatgtttcattaatatttatttcactcaaaagatttttaatataattgtgttgttttacagaaacaacaatgattacatttctactatcatgtgggtctctacatttattcaagtaacccttttttgataattcttttacgcttttaacaattctagattggtctataccgatataacttataatgtctctcataaaatatttaccttcatcatttttaaatacatctaaatatgctaatactaaataattatctaatgtaagacaaaaatatttttttaaatatttacgcagctcatatgtagttaatactcttttcattaatttaatattgctcttgcttttcaaatcattcatcaagtcttcatcccttacttttaattgtcacgtcaaataatatttgtctttaactagtaataactccaaatatatttagtttgtggtgctagctataaacacaaatgaatcataacactatattttgattttgttcaattgtttttgtttttggataataaatgaatttgtcatttgttattccgtgatttttagttatttatattttatatatattatatataaaaatatttaggttaacatgtcttcaaaagagattgcttttatattactttaaataatataaagtattgggacatcagaaaatagtaggagaatgtaaggtggactatcaaactttcgaaaaggtcaataaattcataaatgtagaagcgtacatattttttctcactcaagagttaaagcaacaatataaattatcattaaaagaattgttgatattagcatatttttattacaaaaatgaacacagtatttcactaaaagaaatcattggtgacatactttacaaacaatctgatgttgttaagaacattaagtcactatctaaaaaaggatttataaataagtctagaaacgaagcagatgaacgccgtatttttgtttcagttactccaatacaacgtaaaaagattgcttgtgttattaatgagttagataaaataattaaaggatttaataaggaaagagactacataaaatatcaatgggctccaaaatatagcaaagaattttttatactttttatgaacattatgtactcaaaagattttttaaaatatcgatttaatttaacatttcttgatttatctatcttatatgtaatatcatctcgaaaaaatgagatactaaatttaaaagatttgtttgaaagtattagatttatgtatcctcaaattgttaggtcagttaatagattaaataataaaggtatgctaatcaaagaacgatcccttgcagatgaaaggattgtgttaatcaaaataaataaaatacaatataacactattaaaagcatattcacagatacttccaagattctcaaaccaagaaaatttttcttttaaatttaaacagatttacctcttgataaaataaataagcaatcataatacttctcaatttagtataaataaaaatacataattaactttcttttgtttttatattatttcaataccctactatatatcacaacacataaattaagcatgacactcattcaatttagttcaccatttcgtgttccaattttattgagtatcatgcttttaatgttataaccctaattctttaataaatcgtgttaattcttctcgcatactgtcatctttcaatgcatattctatggtagttttaacgaagcctaatttttctccaacgtcataacgttcgccttcgaagtcatatgcatacacttggttatcattattcatacgttcaatcgcatctgttaactgaatttcgttacctgcgccttctttttgcgtttttaaataatcgaaaatttcaggcgttaatacataacgtcccataatagctaggtttgatggtgccgtaccttgtgctggcttttccacaaactttttcacttcatactgacgtccgtttttagttaatggatcaataattccataacgatgagtatctgcttctggaacttcttggacgcctataactgagtgcccagtttcttcataaacgtcaatcaactgtttcactgctggtacttcagattcaacaatatcgtcacctaataacaccgcaaatggttcattgccgataaattgacgcgcagaactaatcgcatgccccaaacccttttgttctttctgtcttacataaaaaatattcgcaagttccgttgaatactgaactttttctagtaattcagatttacctttttcttttaacaccatttctaattctttttgactatcaaaatgatcttcaatcgcgcgtttgtggcgacctgtcactataataatatcttcaattccagctcttgcagcttcttcaacgatatattgtattgtgggtttatctaagataggaagcatttcctttggcatcgctttagttgctggtaaaaatctagtccctaaaccagcagcgggaatgattgccttttttatttttttcaaagttaatgtgctccttttcctaagtattaaatctatgtatcaacgtcattttaacactaattagaacgccttcatagtgtcattgagtatgtaattatttcttgggaaatttgatttaattttaaaaaacaggcttacttcatataatttatgaaataaacctgccaattttggattgattatgctttgtgattctttttatttctacgtaataacgctaatcctaaaatgctaaataatccgccgaacaacatacctttgtttgttgattcttctccacctgtttcaggtagttcagatttcttagattgtgcttttttagttggtgccactgctttaaccttttcattgatttcaataacaggtgttactaccttaccttgttccactggtttagaaggctttttaggttcttcttttgcgggtggtactggtttacctggctcagatggtatttctgacgttggtggcgttggtacttccggttcacttggtacttctggtgtcggtggcgttggtggcacgattggaggtgttgtatcttcttcaatcgtttgttgaccttcattatgaccacttacttgtggaagtgtatcttcttcaaagtcaacactactgtgtccaccgaattgataattaggtttatctttgtttgtatcttcttcaataatttcagtgtgcttattgaatccatgaatatgtggcacactatcgaagtcgatatcaatgatattaccaccttgttcatacttaggtttgtcttcttctgtgtcttcctcgaatgactggtcaccattattttgaccttggatttgaggtacactatcgaaatcgatatctacgatattgccaccttgttcatatttcggtttatcttcttctgtgtcttcctcgaatgactgattaccgctattttggccaccttcgtaacctaattcactcttaatatcaacatggctattttcttcgatttcttcaatcacgccataattaccgtgaccattttcagttcctaaaccagaatgagaaatatgctggtaattttcagtaatctcttcgattggaccttgagcttgaccatgttcttcaggtaattcatccactagttcgataagattactttcagttgtatattctttcgtatcttcaactgttgtatgatcgctcactgcgccagttacaataccttttgtagaatcttcgtcaaattcaactaggttagactcagtagtaacctgaccaccacctgggtttgtatcctcttcatattcaacaacatcagcgtgatgttttgaattttcatgtgtagattcttcaaaatccacatgaatagaatcttcttcagtttcaataataccttctgcatgaccttctgcaccttcaacagctgtatgatattcaaaatcaattggcttagaatcgttactttcttcgattgtaccagtcaattcatgcttctccactggcggctctgatttaatgtctaaatcaattggttcactcttctcaatgataggatcatttggtttatctttaccgtcgccttgagcgttgttagagtagaatgcaacaccatttttccaagttaaattacttgtattataatagtaatagttataataaccaaaaagatgcgtttgaaactctaaggtgctagcgtttgaatcatagtctccctcatactttattacataatttttactttgatctaaattattaaagtttaaagaataaccaccattacttgtatattgtaaagttagttccccagtcacatcttcaaatttgctgacatcatcaagctttgcatatatgctttcagctaattcgtctgaaccaatatgcttatatactttaactgttggattcttaacattttgtttatatccagatgtcacttgaccagttactgtcacagagcttaacgactggttgttaggtttcacatacgcaaaatggctaaatttcccatctgctttatttaaagtatcaattcgcccattaacagtaacgcccattctatctttaacaccgtctaaatatttgatatcaaattcttttgagactttattttgacctaaagaaacctcaaccttttccattccttgctttgtcactgttgttgggtcgataaataggtttaaagttaattcagcagttaagtcttttttgttatctatataatcagtaaatgtataacgaattttacgttcgcctataacttgaccatttgccataactttatcttctgttgaactttttatctctggaactttacgcagtgttgagataccatgagtttcaacattatcgcttaatgtgaaatcaaaataatctcctgccttaattccttctccaaatttccatttatatttcaaggttactctttctgcgttatgaggattaacgacattcgtatcttgtttatgtcctacaatttcactaccattttctactgtaactttacttgttacatctgtacctgtcgctttagcttcttccactacttctttctctgcaacttctgcaacgtcagttgatcttttcattcttggtttaatttctgagacgttacttggttgagctgtgtcaacttgagttcctgtagttttcttatcagcaactttttccgatgccaaatcaactcgcgaagtttctacttttggtgcttgcacagttgttggtgcttcttctgttgttacttgtgttgattgtgatggttgctcagttgatgtcgcgctgtatgattgtgtttcatctattgtattaacgttatttgtagttgtttgtgtttcgcttgctttactttcagtagctgaactcccactttcctctactgtagtattgttttgttccgatgctgcagcttctttttcttgtcccattccaacaacgatcattgttcctaagaatactgaggccgctcccaatttgtgttttcttatgccgtatctaagattgcttttcactataatattctcccttaaatgtaaaattcatttattttttaactcaataaatgcaattctatattgttcggtttttaaaagcaatgaaaaaaagcgagttaataaaaagttaagattgttgttaactttatgtataatgggttttttattatttagaacacacatatatattgtatacaaaactcttgaacaccttgatataacgggcttgtattttttatacttactttttaaattaaattcaaattcatctaatttaaaacaatatactaaatcatacataataatcgcctgtacaatgcatcattaacaagttactgaaacgcctttcattgtattaataacgctaatataatttttatatcgttcggtttttgtttgattttaatgattatttatacagaaacagccgtatttcaagacgacattttaaatttgactaaatttgcatctagttaataattgcatttatcaaatttgtcttattgatccaacctaatttgtacttacaaactagttttaaattctaactttatctctcagttcgttatcaatcatcagacataaaccaatgaagcaatcagaaaacactctaattttctattaaaaatttgatttaatataaaaaacaggcttacttcatgtaatttatgaaataaacccgtcaatttttgtttaattatgctttgttattctttttatttctacgtaataacgctaaacctagaatgctgaataatccgccgaacaacatacctttgtttgttgattcttctccacctgtttcaggtagttcaaatttcttagattgtttttgtttagttggtgccactgctttaaccttttcattgatttcaataacaggtgttactactttaccttgttccactggtttagaaggttttttaggttcttctttagcaggtggtactggtttaccaggttcagctggtacctctggtgttggtggtgttggtgtttccggctcacttggtacctctggtgttggcggtgttggtgtttccggctcacttggtacttctggtgtcggtggcgttggtgtttccggctcactcggtacttccggtgttggtggcgttggttcgcctggttcacttggtacttccggtgctggtggcgttggaggcgttgtatcttcttcaatcgtttgttgaccttcattttgaccgcttacttttggaagtgtatcttcttcaaaatcaacactgttgtgtccaccaaattgataatttggtttatctttatttgtatcttcttcaataatttcattatgcttattgaatccatgaatttgtggcacactgtcgaagtcgatatcaatgatgttaccaccttgttcatacttaggtttgtctttctctgtatcttcttcgaatgactggttaccattattttgaccatgaatttgaggtacactatcgaaatcgatatctacgatattaccaccttgttcatatttaggtttatcttcttctgtgtcttcctcgaatgactgatcaccactattttggccaccttcgtaacctaattcactcttaatatcaacgtggctattttcttcgatttcttcaatcacgccataattaccgtgaccattttcagttcctaaaccagaatgagaaatatgatgattgttttcagtaatttcctcgattggtccttgtgcttgaccatgttcttcaggtagttcatctactagttcaatcagattaatttcagttgtatattctttcgtatcttcaattgttgtatggtcgctcactgcgccagttacaatatcttttgtagactcttcgtcaaattcaactaagttagactcagttgttacttggccaccacctgggtttgtatcttcttcatattcaacaacatcagcgtgatgttttgaattttcatgtgtagattcttcaaagtcaattggatttgattcctcagaggactcagtgtatcctccaacgtgacccgcttcgctatccacagcagtatggtaatcgatatcaatagctgatgaatccgtttcttctattgtttcaatgtatccatcaacataaccaccttcaccatctatagctgtgtggtaatcaatgtcaagagttgatgaatcatattcctcttcaacagtagttactaaattcttatcatattgtcctttaagagtttctttaattgtatcttctttatattcaaatttattattttgaataatcggaccatttttcccattaccgttcgctttattgctgtataaaactaaaccattatcccaagttaatgtatatcctctatcataataatatttataaagttgctctggatgtcctaccatttgtgttctaaaatccacttcatcagtaccatttaaatactctccatcataatgaacaacatacgttttatctagattttctaaattcaatgaatagcttccattagtttgtacattcaaattcccattcatactacttgtgacttctttaaatttagaagtatctgtcgtgtttgcatatacacttttcgctatgtcttcattattacccaagtattcaaataccctaacttttggttgatttccattttgattactacctttcattaaagttccagtaacagtcacacttgttgttttaccattattaggtttaataaatgcaacatgcgtaaatctattattcgctttattaaatgtttcaatcgatccatttaaattggcataataattcccaataccatctttatatttaacatctaattcctttgaagtttgttctccatttagtgttgaagttatagtttgatttccattagtttgtacagttttaggatcaataaataaattaatttctagttcagccgttacatcaaccttatcttcaatatcatttgtaaatgtatacctaatctttccgccctctaaaattttacccgtcgccataacaaccgagccatttttaatttctggtacttttctagcagttgatacgccatgcgtatttacattatttgacaaagtgaagtcaaagtaatcaccttggtgtaaaccattctcaaatttcaatttatattttagcaccgctctttggcctgcatgaggttctactttatttgtattattatgtccttcgatagagctttcagtcactgtaactttactagttacatctgtacccgtttccactttcgcgtcactagcttccttagcttcaactacgtctgctgatcttgtcacacgtggtttactttctgatgccgttcttggctgtgccacttcaacttgtgtttctgccacttgattttgtgtagtctttttaggtgttaaatctacttgtctttgatctccgctattgtcttgaggttgtgttgtttcaacttgaggtttcgcttcttccttaactacctcttctttaactgtttctaaatttgctggttgtgcagtttgtggtgcttgtactgcttttggtgctttttcagttgttacttgtgttgcgtttgacggttgttctgttgctgttgcgctgaatgattgtgtttcatctattgtattaacgttagttgtagttgtttgtgtttcgtttactttattatcagtagctgaattcccattttcttctactgtagttgtcttttgttctgatgctgcagcttctttatcttgtcccatcccaacaacgatcattgttcctaagaatactgatgctgctcccaatttatgttttctaatgccgtacctaagattgtttttcactataatatctccctttaaatgcaaaattcattaattttttaaacttaataaatgcaagtctatattgttcggtttttaaaagcaatacaaaaaagcgagttaatgaaaagttaagattgtcattaattttatgttaattgataattttattatttgaaatatacctataaattgtattcaagtcatcagaaacccttgtcacacaagacttgtattttttatacttattttttaaattaaattcatcattatctaatttaaaacaatatactaaacgtttcataattatcgcctgtacaatacgcacaaaaacatgtcttaaaacgcctttcattacactaaaatccctaatatactttttatatcgttcggattctgactatttcagacgattttctgcataaaaataaacgtgtttcaaggcaatatattgcaattacctaaaaacacgtttacttaatatttagttaaacaaataagctgatgaatagaatgaagatgatacctgaaacggaaataatcgtttctaataatgaccatgttaagaatgtttcttttacagttaaaccaaaatattctttaaacatccaaaatcctgcgtcatttacatgagacaaaatcacactacctgcacctatcgcaagtacaactaatgcaacatttacatctgatgattgtaataatggtaagacaatacctgtagttgaaatcgcagctactgtagccgaacctaatgcgatacgtagcacagctgcaacaatccatgctagtaaaattggagacatctctgtaccttcaaacattttagcaattgtatttccgacaccaccgtcaattaatacttgtttaaatgtaccgccaccgccaataatcaataacatcattccgattggataaatcgcattcgtcactgattccataatatgattcatcttacgttttctcattaatcccatcgtaacgattgcaaataatactgctattagcatggctgtccctgctgttcctatcatataaatgatagattcaaatagatttgtaggtttgtcgtgcccagttacaagttgcgttatcgtagacactaacattaatatgactggtaatgttgcagttaataaactcataccaaatcctggcatctcttgatccgtaaattctttttgtgcacctaacgctgaaatatcgccttctcgtgtatacgcagacggaatcattttttgtgcaactttgttaaatataggtcctgcaatgagtgtaactggaatggcaataatcataccgtacagtaatacatctccaacatttgcctttaattcttttgcgatgactaccggtcctggatgtggtggtaaaaagccatgtgtcacagataaagctgttaccataggtagtcctagttttaacactgaaacatttgcgcgttttgctactgtaaatactaatggaatcagtaagactaaacctacttcaaagaacaatgcaataccgacgataaatgctgcaacaagcattgcccattgtacatgtttttgaccaaatttttgaatcaacgtgtctgcaattcgagttgcaccaccaccatcagcaagtaatttcccaagtatggcacctaaaccgaatattagtgcaatgtggccgagcgtactgcccatccctttctcaatcgtctccataattttagtcaatggtatacctagcattaacgctgtaatcatcgatgtgataattaatgaaataaatgtatttaatttaaacccaataattaatactaataaaataacgatacctaaaacaacactgattaacggccatatttcgttaaacatgacattcccctctttctcttttcaatagaatgtaacaccgtcgtcgcgcacgtattccacataatatatagtagtcatggcacaacaactttatctaagatgcttaagtgacgtatttattgtgttttattttcagccatatgttggcgttgaaaatctgcaatttgttcataattctctgttaaagaacgacttaaattgataaaaatggatacgagctcttggtaaacagcgacattttcttcaaacggcgtatgattatttgtagcaccgaccatcgatgaaacgattgaaaaatcttcaatgtcacctacagctttaagtccaagcacgcaggcacctaagcatgaactttcataactttcaggaaccactaactctgtgtcaaatatatctgacatcatttgacgccatacttcacttttcgcaaaaccacctgttgcttttatcatcttaggcgtttcattcattacttcaatgagtgcaaggtagacggtatacaaattgtaaagaacaccttctaatgcagcgcgaatcatatgttcttttttatgagataaagttaaaccgaagaatgaacctcttgcatttgcgttccaaagcggcgcacgttctccagctaaatagggatggaatattaaaccatctgcacctggtttaacacgctttgcaatttgagttaagacatcataaggatcaacaccgagacgtttcgcagtttcgacttcactcgctagcaactcgtcgcgcaaccatctcaatacgacaccaccattatttacaggacctccgatgacgtagtggtcctctgttaagacataacaaaatattctacctttgtaatcagtacgcggtttatctatcacagtacgaatcgccccagatgtaccgattgtgacagcaacttctcctttaccaacgctattgacacccaaattagaaaggaccccatcactcgcaccaataacaaacggtgtatcttcattaagccccattaatgttgcataacgttctttcatgcctttcattacgtacgttgttggcactaattccggcaacatttccttggaaataccaagcaattctaatgccccaacatcccaatctaatgtttctaaattaaacatccctgttgcggaagccattgaataatcaatgatatatgtatcaaataaatgatagaaaatgtatgttttaatatctgcaaacttagcagtacgttgaaatacatcttgccattcatgtttcatccaaaaaattttcactaaaggcgacataggatgaataggcgtacctgttcgctgataaatcgcattgccatcatgcacttcatttattactgttgcatattttgcagcgcggttatctgcccaagtaatattatttgttaatctttgatgtttctgatccatcgcaatcaagctatgcatttgcgcactaaatgacacaaatttaatatcatctttattaacttttgattctctcataacatatttaatagtcattaataccgcatcaaataattcatctgggttttcttctgagacatcaacgtttggtgtgtgtaaatcatagccgatttgatgtttcatgatgaatgttccattttcatcatataagactgacttggtactcgtcgttccaatgtcgacaccaatcatatatttcatgacaaatccttctttctttcattttaattcaaccaaaatccttcaatatctttaccaacatcgtcgaaatttaagtgaaacgcttctttcaaaatttgactgtcgtattgttccactgcatcaataaacacttgatgattatgatgtatgcgttcaaaatcttgcgggttctgttgcatacgttgtcgcatggatgttaaaacgagtgccatcattactggttttaaatgactccaaaatgagtttaaatattgatgattagatgctttgattaatgtttcatgaaattcaaagtcatgcttcgtaaatgattctgcatcctcaaattttactgccactttcatcatttcaagttgtttcttcatttcttttacgataggtagtcgctcttgatttttaactcttgaaaatgcaaaagactctagcatcagtcgcaaatcgtacatttctttcttttcttgttccccaaacggcaacacatgtgcacccattctttctaattggatgagttgattttgttgcaataatttaaatgcatctcgaattggcgaacgactcacattaaattgctttgccatttgattttcagtgagtaacgtaccttcagctatgtgaccattcacaatacctaagcgtaattctgccgcgataccttctccagttgtcataccttccaaccatttctctggatatccatacatcatcaaagccactccttcattacacgacatacttgtatacgagtatgttaatatagttcttaatcgtttgcaagcgctttctttacgcgtactaaaatagcgaccaccccttttcgatgtaagtttaaagggaatggtcactatcacacgaataatttaattgttatgttgtatgcgggatatttctaattgttctgtactcatatgcgctttaggtacttcaatgcaataatgcgtttcatgacagttcggacattcgaatcgacgtgttgtcgctgtatgtttcgctttgataactgcccacaaagatggtgagaatatatgctggcagttaggacataaataggcaaccttttgttggtaataaaaagtaacaccaatgccataacaaatcataaatggtaaagcaattaaaaacggccatttatttttcatcaaaattgcacttataatgctagaatattgaattattcctataataccagcactaatccaaatgttacgacgaatacttttcatttcagctgatttactcatgacatgctctatgtcttttaagtgtgtgattggagacgtcgacgcttcatttacgtaatattgaacatttttaattttgtttaataccgcttgttgctgtttgacttgttggttaatttcttgttgtttcatagttagcaaagtattgagcgtcttcaaagtaccttcaccttttagcaacatatctatatcgcttaacgcacaacctaaatctttaagcaataagatcaactctaatgtttgtcgctgttgttctgtatacacacgacgctttccttctgtaaatccttgtggtttcaaaatacctttgcgatcataatattgaatcgttcgtgttgtcacattgcataattttgcgagttctccagtcgaatagttagacatagattccacctcctacaattaccatagttgatgacccgacgtcacgagcaagtacaatttccatatttttaagaaatttattatactaggcgtcttattgttgtgatttcgcaccatgttgatttacaaaatcactcaaattaagcaacacacctactatacgtctactctgttatttcagaatgaatttgttgtaatttattttcaacttcagtaatctctgtcgcacattctttcaataaatctcgatacttttccgtctctgccttatttttataacgtattttatgttctaaacttgcccacatatccatacctattgttctaatttgaatttcaacaggcaatacctcaacgcgttctgctaaaaagactggaatggatacaacgatatgtaaactgcggtaaccattttctttagggtgctgaatataatctttacgttttatcaattgtacgtcttcttgtttaagcaacatctcttcaatcaaataaatatcatctaagtaattacatactacgcgaattccggcaatatccagtatgtgttctttggcagtttctgcgctaatctgtaatcctttacgattaagcttttctattaaactacgcatttctttcacacgtcgctccatatgatgtataggattgtgtttataaatgtgattgaaattgtcatctaaaatactcagtttagtgcttatttcctttagtgctgacgaataaatatgatctaactctacgaaacctaataacgtatcaaatgcttcatcaccattttcaaatttacttaaactatttttaaaatcatgtcgcaaatcctctaaatatagtgatggttttcgatctacatacatttttatactaacctccgatatataatcatctttattgtacctaacattttattaagataatactaatacactatcgaactttgggctgatactgaaacagcacaaagaaactcaaacaattcgaattatgtatcaaaaccttcaattataggaagtgattttaaaatgatttaacgcaaaaaaacacctgttaccgttatataggtacaagtgcttaattgatagagatgttatacgtctttaaatgattccacaacttttggatgtggaccatccataagcggttctctttgtcgaacgccaccactttggttgccaattgattcgctatcaaagtacgatttatcttgatttgattgttcttgaatatgttcttcattatcagttgttgcatattcactatccacctctgttttttccattgttgctgtatggaattgtacgaagttctcttcttctaatgctttgatttcttctttcgataacgctcgataccaatctttcgcttttttcgccgcaataggaacaacatctttttcaagatatccttcttttaacattgcattcgcaatttctatcgctttttgccgtttaattacttcaaaatctttccatttttcggggtaacctttcattgtaaagggcatttccttaacctccaatatgttataattcatgttatataccaccataattataaaatgaaacatattaaacacaattttttagactcccgtcataataacttcagacaaacgttagtctgacctgataaatattttattttaaacgttcttgtctctctcacgaaaaccattgtgctgaatattcatcattgctgattgaatataattatactgtggtaaatctggtaatatctttatttctaattctgtatttaattctaaatgcttagcgatgttttcaaatgttgctaaatactcgcccattaattgttcatttattgtaagtctatcttcattagccatggctctatttaacataaagctaatttcttctaatgcgaataagctaggataataattttgaatcaatgtcttatcactaaataattcaccattagctgcattataaacttgcgtcatgttatttaatttcacagataggttcatagccgtgtttttctgatacacatcatctttatattggttttcagaaaacaaataatggaagagcgttgcttctttacgaacaacttcagccattacattaggaagcaatgcggatgcggtacgttgtccaaggacaaataaacctatgattgcaatcacaatacccattgcaacgtcaataactcttggaaacgcaatgttaattgttaaattctgtgatgctaatccattcattaaaataacttgtattgtaataaaaactactgcaatcgcataatttgctcccaccaatgcttcagtaaacaatgctgcaatgcccattaaaattactgcaacaggtgttggtattgaaaacaacaatatgactgaaagtactaacacacctaaaatagtacctaaacctcgtgccatacctctctcgattgcatgtatagttgatgttcctagtaatattgtatgtgcagataacggtatccagtatgctttttcaaaatcaaacattaacgcaataaatatcgctatcatcataatcgctgtatatctcaatgtatttctaaaaacaatagagtctaatgttaaattttgataaatgcgtttactatataaaggttttcgcatgtctgcttcatacgcaatacgcgcttcatttgcatgcaccatttcatcaattttcaatatatggttgaataaattttgaaattcctctgttactgtcacttcttttcgccaatatcttacattttcctcactattatctagttgtgcaatgatatgatccatcatttcaattaactcatctggcaatggtcgaatttgtttagcgttcaactctaacagttcagaataaatcccttgggcagatgtgtgtaataataataatttttggaaacgtctacttaatttatcgttacttgaagtagaagtgattaataatttatcagatgctttaaaattatccaccgctgtttttgctacttgtaaaaatgcagatttatcattataagtgtgtaacaacttagatatgagtttaaaatcattttgaattgcttgttcttcagctttgtttttagaaaatacgatcgtgattaacaccatcatagtggcaagtataccgcctactaaaatcgcaaagcctctatataatgcttcttcgggagctataggtaagttaatgggtagactgaatgtcacaatgaagaatgtcgatgacggtccagctatttttaaggcagtaaatatataaaatggtataaccgtaacaattaataatgtcattccaaaaacgagtggcgttttggctgttagcgtaccaagcatcatacatattgcaaacgctaaattacaaattattacagttcgcagcttagatcgcgacggacctttaaaaacataaatatgggctagtgttccggttgcaactaataatccaaattggaaattaccacataagtaaccgattattgcgggaataatcattaacagtccctgtcttacacctttataaaagtctaagttaagtcgattgatttttatgagtgatgtcaaaaagatgtcatttcgacttctcctttccttgtcaaaatatttccataatctttttattagcatagttaaaatgaatttgttgctataaattttaattacgcaacatatgtcattataacaccttatactcaattatctaaattcaaaaacttttaaagtccaattaaaattattttctaatgttatttaacatcgttgaacctttggtcgcccacctttgcgctagttaagatttatttgtgacatgttgaaattattttagtgaatacgatatttagggttagaaaaacattcacatagacttaaggtttatttacttcatattattcctagggttcatgatccaaactatagtgaatttaagaaagtttataaaacatatttgcctcataagcttgaatagttcctatattcgttatttaaaatgacattcgatgtcagttcatttcttaaaatatcgaaagatgattacgtataatatatatagtgacgtatttacaaataatggcagtaagcagtacaaaatgattacacaaaaatttccttctactcgataaattaagaagtataaaataattaaaaaaatacttataatcagacctataagaggcaaacttctaatatatttctctaagttttccttcatatgtataacctcctaaaatttatatgtacttttacaagcgttacctgactaatgttttaaaactttatttctttacatatatcattttaataacttcccattcatcttaaaccatatctgttttaaaaagtttgaatttcaacgtaaaaaaagcaataagccccaacaatgtgaaagcttactgcttgtttaaattatttttctattgctttatcatcactaacaattaaaggttgatctggtttcacatagaaccacataatcacagcgattactgctggaacgattaacaattggaatgtcattgtccaacctaaatgttctacgaatagacctgctaatagcggactgattaatgcacctatattaccccataagttcatccaccctgatactgtaccagagaagttacgtcctaagtcagttgctgcagcccaactcatacccattgaaataccgataccaccaagacctagtgataaccagaaaatacttacatataaatttcctgtacgtacagcaaagataattgaaactgcaaacacaataaatcctgcgattgcaattacacctctagctacgaattttgaacgacctaatcctaatacacggtcagaaattgcacctgctgataagattaagaagaacattaataaccaaggtaatgaactaatgctcatttctttaaagttaacgtggaatacttctgttaaatacgtcggtaaccaaattaagaataatgtaatgataaattgtacaacaaagtattgaattgcaattgcatagaagctaaaacgtttaaagaaatcattccatggtggtgatgacttttcagtagctacgatatcacgattttccataatgaaacgtttctccgcttcattaaccattctatgttgctcaggtaagtctttggcaataatcgcccataatacagccattaaaatacctactgcaccaaaaatgtaaaatactgcttgccagttaaatgcgttaacaatagcaattgtaactattggtgctaatacaggtccgaaatatgatcctgctaataatgcacttgatgctctacctttttcatttttagagaaccaaaatgagttaaacacagcattagaagggtacattggcgcctcacccacaccaaataagaatctcactaaataaattaaaccgtggttcttaatcatacccgttaagattgtaaatgcactccaccaaactaatgcaattgtaatcatcttacgtggaccgaatttttcagccaacatccccgatggtacttgcattaatgcataacctagagagaagaatgaggccaataaaccaaattgtggttttgtcatccctaaatcatccatcatttgcttagcgatatatgaaatatttgctctatccatatacgcaataaccccaataaagaagaacgcaagcgcgaacatccaccttacgttagttcgtttttccttcataactattcctacttccctaattaattttttaaaacttaccctgaaacgttaaaattttcggacatctggcatgtccacccctactttgtcacaaaattgtaccaaagttattttttataatattatcagacatggaaagcgtttacaatagaatctataaaaattttattaaattccgcttaacttttgctattaaaacgatataaaggaacttttagttacatagtagcctatcttttgttaattaaaaatactgcaatcctagtgttttaaaacgtatattgcaggctttcttacatattagacattcattttaaattgcataaaactacattgctcattcattgtgcagcgcctgttatttagatgatcatttgttgacttttcgtacttatagcaagcaattttttgatttattgcttataatacattttaagacaaatgcttgtttcaacatcgcatacgacatcattcattattcatttgaatttatccagtttctatttgtctgcaattgctgaaaattaaaggagcttatttttaataatggaacaaattatcactgaatttattagtcgttttgggtatgcagccatttttatattaattttattagaaaatgttttacctatcgtaccatcggaaattattctgacatttgctggccttatgtctgttaaatcacatttatcaattttaaccttatttattattgcaaccatcgcatcgtttatagggctgttaattttatattatatctgtcgtttaatttcagaagaacgtctatatcgctttattgatcgacacggtaagtggattaaattgaaaagtaaggatttaaagcgagcaaatgattggtttaaaaagtatggcgtatgggctgtatttatctgtcgtttcatacctgtattacgtgtattgattaccattccagccggtgtaaaccgcatgaatgttgtgacatttaccgttatttcattaataggtacaacaatttggaatttcggtttaattttactaggacgcacgttgagcgatagctttggtatgttgatgactggtcttcatacatattcacgtattatgtatgttgtcatcattatcgcagtcatttactttgctatacgttacattggcaaacgtaagagagtaaaataatattgttgttagtataatggtatattttcaattgctataaataaaaagcagtaaaatcatttcgatggctggaatgatttactgcttttttaggtttatttggcatactttagttgaaagtcatctaaaaccctttacgttaagagatataatgaagtttcccataaaagttcagttccctcagtatgtaccatttattccgcaaacgcatctcacaatccatctataatacaaactatcatcttaaataagcagaatttaccctgtcttccacacaaactgttttcgtcactttaatatgccttctattcaaaaaagtcactcataacaaattgcgcattttaataaatgtagcaatgccatttgcatgctacaaaaatactcgtattcatatttatgttttatattattaaagttttttaaatccgtatttttataacacttgctatgtgataaaattaattttatatataaaatcttaagattcagattatttaatagcaaaggagatagtgatatggatgttttaacaatagaacatttaacaaagaagataggcaacaaaacgattctcgaagatgtatcatttaagctgaaacgcggacaaatagttggtctcgttggagcgaatggtgcaggtaaaacaactttaatgaaagttatattaggttactctagtttccaaagcgggaattttaatgttattaacagcaaagacagcaaaagcaatatcggtgcattgattgaaaatccaggaatatatccttttatgtctggatatgaaaacttgaagttattgaatgaatcaaaaaacactcaagatatcgataaaattgtctcacaacttcatatggatgaatacattcataaaaaagctaaaacgtattctcttggtatgaaacaaaaattaggaattgctatagcatttttaaatgaacctcaatttattatcttagatgaaccaatgaatggcttagatccaaaagctgtgcgagatgttcgtgaattgattgtccaaaaagcgcaagaaggtgttactttcttaatttcgagtcatattttaagtgaattagttaaaatcacaaactctatccttattattaacaaaggtaaaattgttacagaaacatcggaagaagaacttaaacaatttaaagataatgatttagaaaatgtattactagaaatcatagaaagggaggaccaagcataaaatgggaactttaattaaacaagaatgtttcaaattatttaaaaagaaatcaacttttatcgcacctattgtctttattctactaatggttgctcaaggttatattgctacaaaatacaataaaatttttacgccacaggaatctttcacatctgcttataatggtttttcatggtttgcatttttattaattattcaagcaagtacaatcatttcaatggaatttcattacggtacgattaaaaatttactctatcgtgaatattcaagaacaactatgattgttagcaaaatcatcacattatttattatttctttaatttattttgttattacaattattgcttcaattgttattgggtctttattctttaatgatttaaatatatttgaaagtagcggtaatcaattatctttattgaatcaattattattagttagtttaggcacatttgttggcgtttggttagttttaagcttaacgttgctattatcatctgcaacaaattcaacgggagtagccattgctgtaggtattgttttttattttgcaagttctattttagcagttattcaaacggcacttttagaaaaaatagactggctaaagtggaatcctattaatatgatgaatattatgcttcaaacagttgaaaaaggctttagtaagtcgacgaaattagaacttcatgaattgtttattggtaatattgcttatatttctattttcttaatacttgtagtatttattttcaagaagaaaaatatttagtaacttcaagttattaaatgtctaaatacacacatattccatcgtaattcaaaatcattttcaaatcccttcacccaaataatggtgcggggatttttttatccaaattttggcaattccacattttacatatcgtaattttttaggaaactagtgaatataacaaattcctcctctcatttttaaaataaatatagcactttcccacttttacttaactaaactgcaacgactcctaataccaaaatcctgccctctatttttatcaattcaagcatacttattgaaaaatgttaacgttttcttgataatcattgtaagcgcatttattttataaactaacgtttgaaatatactacaggagtgacacgtaatgactcaaattactgaaaaagaattaaaaaagaagtatttagatttactatcccaaaattttgatactccagaaaaacttgcaactgaaattatcaatttagaatcaattttagaattacctaaaggtacggaacatttcgtcagcgatttacatggtgaatatgaagctttccaacacgtattacgcaacggttctgggaacgtgcgagcgaaaatcaatgatattttcaaagagagactttcaactaaggagcttaatgacttaactgctcttgtctactatccagaagacaaattaaaattgattaaaagtgatttccaaaattgcggtcaacttaatgtctggtatatcacaacaatcgaacatttaattgagttaattaaatattgttcttcaaaatatacgcgttcaaaactgcgtaaagcattgccaaaacaatacgtttatattattgaggaactactgtataaaagtaatgaatatcaaaataaaaaatcatattacgaaacacttgttaaccaagtaattgaacttaaacaggcagatgatttaattattggactcgcttattccgtacaacgcttagtcgtcgatcatttacacgttgtcggtgatatttatgatcgtggaccacaaccagataaaattatggatacactgattaattatcattccctagatattcaatggggtaatcatgatgtgctttgggttggagcctatgctgggtcaaaagtatgcttagcaaacttacttcgaatttgtgcacgttatgataatttagatattatcgaagacgcttatggcattaatttaagaccactgcttactttagctgaaaaatactatgacgcagataatcctgcttttaagcctaaaaaaagacctgacaaacacgaacgtttaactcaacgtgaagaaagtcaaattactaaaattcatcaagctattgcgatgattcaattcaagttagaaataccaattattaaacgtcgtccaaatttcgaaatggaagaacgtcttgtgcttgaaaaggttaattatgatacaaatgaaattacagtttatggtaatacatacccattgaaagacacatgtttccaaactgtcaatcgtgataatccagcagaattactacctgaagaagaagaagtcatgaataaactattattgtcattccaacaatctgaaaaattacgtcgtcatatgtctttcttgatgcgtaaaggctctctttacttaccatataatggcaatttactcattcatggttgtattccagttgatgaaaatggtgagatggaatcatttgaaattgatggtcatacttacagcggccaagaattattagatgtatttgagtatcatgtccgtaaatcatttgatgaaaaagaaaatactgatgacttatcgacggatttagtttggtatttatggactgggaaatattcgtcattatttggaaaacgtgccatgactacgtttgaacgatactttattgcagataaagcttctcataaagaagaaaaaaatccatactatcatctacgtgaagatgtgaatatggttcgtaaaatgctcagtgattttggattaaatgcagatgaaggtcgcattattaatggtcacacaccagtgaaagaaatcaatggcgaagatcctatcaaggctgatggaaagatgcttgtcattgatggtggcttttcaaaagcttatcagtcaacaactggcattgcaggctatacactattgtataattcattcggtatgcaactcgttgcacaccaacaatttaacgctaaagaaaaaatactttccgaaggtatcgatgaactttctataaagcgcgtcgtagataaagaattacaacgtaagaagattcgtgataccaatattggtaaagatcttcaagctcaaatagatattttgaaaatgttaatgcatgatcgctacttagactaaagacgacattttatgcatgtattgtatactgttgtattgatgcggtttacgcattggctacgcaaacgcgatgataaataggcgacctagctacaccgaaaaaaatcccctcactattgcgagtagtgaggggattggtgtatctatgctaattcctgttaactgtattataacaactttacagcaaaaaaatgcaaaatcaactaataaattaatgaaatgaccgacgccctcgcttctacttcaatttaacaaaatactatattagtactatatttttcattaacatgtatgttacattttctatattacttaaaattacgaagggacatttttaaatcatgcgtatcttaaaagagtccattattgtggcatttgcctttgttggtgttgtcgttggtgccggctttgctactggtcaagaaattttccagtttttcacaagtcatggcgcatatagcatttcaggcattattgtaacaggactattgattactttaggtggaatggttgtcatgcatacaggtcatcatctaaagtccagaaatcattctgattcaattaactatttcttatacccctctattgcaagaggttttgatattattttaacaatgtttatgttgtctttagctattattatgactgcaggtggtgcgtcaaccattcatcaaagtttcaacttaccgtattggctgagcgcactcatattagtcgcctttattttagcaacactgtttctaaaattcgatcgtttaattgctgtgcttggtggagttactccatttttaattgcaattgtcattatgattgcggtctactatttcacaacgagtcatcttgattttactgccgctaataatgatgctcagattcataagcagaaatcattatcacctggatggtggtttgatgcgattaactatgcaagcttgcaaattgctgctgccttcagcttcttatcagtgatgggtagcaaagttaaatatcgtgactcaacgttatacgggggcttaattggcggtttaatcattacatttttactcatgatgattaatctaggtttaatttctcaattcgataaaattaaacacgtcgatttacctacattaaaattagcgacacaaatgtctccgtcaattggtattattatgtctgtcattatgatacttgtcatctacaatactgttgttggattaatgtatgcatttgcgtcacgtttcagcgttccatttagcagacgttacttcatcattattattacaatggctgtcatcacttatattagtacatttatcggtttcatttcattaattggaaaagtattccctattatgggattgttcggtttcatcttactcatacctgtactctataaaggtttaattaagcgtattaccggcaaatctcatattgattaaaatatctatactattgtaaaatttagtacaacacttcaaaatcaaaaaagcgggcagatgaaaagtaaaaatcttttccatctgtccgcttcttaatagaactgttatttcccaagtatttgttgaccaaccgttaatccagtttctgtaatttcatgaccattcacccaaacttcttcgacttgtgccccacgtgtcttaaacaagttaatgacttgttcacttgcagctaatggcacaattggatcatgtttccccatagaaagcaacacactgacatctgataaattctttgttgacgttacttcaactgggtataacggtgcatataacaatgcttttttaaatggtgcttctgaacgcaacattaagttaatcgctatatttgatccatttgaaaatccaacaagcacagccttttcaatatcaaattcataacgttcagcagcttctttaatgaacgttaacaattcttgtccacgaaatgccaaatcttcttcatcataaacaccttcaccaagacgtttgaaataacggttcatcccattttctgaaacttgtcctctaatacttaacaagtgataattttcattcaatgcttcgcctaacggtaataaatcgaactcatcaccacctgtaccatgcaataatattagtgttggcgcaccattttgtccttctctaaaaatatgtttcatcacaaatcctcctcattccaattaaccatgttgacgcttcgtattaaaaggtctaacttccgattcaatatattctcttttattttctaaaaatggtggcaatgataaaccttcacctaatgtttcatacggttcatcttccataaatcctggtccatctgttgaaatttctattaaaatatgccccacacgtgcatataatgcttcaaaatagaaacgattaacgatgcctgagttgttaatacctacctctttatatttcgttgcccacgcttctattgcatcatgatctttcacacgaaatgacacatgatgtacctcaccataaccttgacgtgctgctggccctttatcatcttttattaagattacctggccaccattgcctccttcgccaacttcaagtaatgcgacattatcttcatgcgcaatagttgtcataccgtaaacagtctctaaaatatttttaaagtcgtcaaaataacttactttaatttcaatgggtcctaatccataaatcgctttatctactggaaccggtccattcttccaaggtacaccaggtgctaccccttcatttaactcatctgaaattaattgatacacttggccatcgacttcttcaaatggcaacacttttttaccaaataattcttgaataccttcgtgtttaacaccaaattcatcaaagcgctgttcataatacattaatgcgtcatcgttaggcactctaaaagacggtcttgtaatggaatttgttcctgcctgcccttttgtaatatttggaaaatcaaagaacgtcatgtctgtacctgccgaacctacatcatctgcaaaaaaagtatgatacgtataaatatcatcttgattgactgtctttttaactaaacgcatgcctagtacttctgtaaaaaatttataattacgttctgcatcatctgtcattgctgtaacatggtgaatacctaatagttcatgattatttgccattttatataccctctttgtcttttagtgtatttatctcgaaatcgagatattttaatgtaaatttttagtgcacgccttacacttctgtagattgtgcacttagtttcttaaacgcttgttgtaagattgttaattcatcctttgttaacacatcaaacgcttttgttaatgtctcagcatgcttagggaaaatatctaccatttgactttgacctttttcagttaaacaagccatatatacacgtttatcatctttatccttttcacgtgtaatccaacctttgtcctctaattgacttacaacatatgaaatgctgctacttgcaattaatacgcggtctctaatacgttgaattggttgcggacctttattataaagcaactcgagcactgcaaattcagtaatatttaagccatatcgctttacgtcttcttttgtaatttgctctaatgtgtctaacgccctattcattccgacaaaaacattgagagattgtttcgttcgatccatatgatcaccaacttttttattttatttcgatttcgagataaattatatagctgaatagatttaatgtcaagatacgtgttttcatcttcatttcaaactgtgcttaataaaaataactgcttgtacagtggcaatgtcgtcacatgactgtcatgcacctttgacttcgtttaagttaaaatagaatagggaaatactataatcaatcatgataggagttgatatgtatgagtaaccttgaaatcaaacaaggcgagaacaaattctatattggtgatgatgaaaataatgctttagctgaaatcacataccgttttgtggataataatgaaattaacattgatcatacaggcgtatctgatgaacttggtggtcaaggtgttggcaaaaaactagttaaagcagttgttgaacacgctcgagaaaataatttgaaaattattgcctcatgttcatttgccaaaaatatgttagaaaaagaagattcatatcaagatgtatatcttggttaaataaattttgcgatggtgcaactgtaccatcgcttttttgttcgcatcaatataaaattgcaaaacgactagttattttgcatttcaaactttatgctatcaattcattttcttttctggtatactttttatactaacttatagaaaaatagaaaaagaggcgatgcataatggcatttcacgataaaacagcaacacaagtgacaaacattgtactgaacgtaagagacttagacttaatgacaacattttacaaaaacattttaggactatccgttaaaagttctgacgataatacaaccgtattatctgttgggactggtggccatactctaacgttacatttattagaagacggccgtcagacttccccacgtgaagcagggctttttcatatagcatttttattaccaactactgaggatctagctaacttcttatatttcgtggcacaaaaaaatatgggcatcggcgctggtgatcatttagtaagtgaagctttatatttcaacgaccccgaaggtaatggtattgaagtctatcgcgatagaccttcatcttcatgggaatggcaaaatggcaaagttaaaatggatactttagaagttgatagccaaactttattaacacatcgtactgatgaaggttggcaaggaatgccagcaaaaggcatgattggacacttacatttaaaaacacatgatttagacgcagcatatcaatgttacattgaacaattaggattccaacatgtgtctgattttccacgtgcgctatttatgtcaacgaatcattatcaccatcatattgctgctaatacttggcaatccaatcaagcaagacaaaacaatgcacaaagttatggattaacacatgttgatatttatcaacccgacgcctcaacacatacatttacggcaccagaagggtttggcatcacagttcattcaaatactgaccttgttccagaaaaataatcatccatactttattaatacaattttttcacgcaaaagcccgcgattcatttatatgaacgcaggcttttattattgctaactttttaattatatatatttagacatgctgtattctatttattcttttggtccaacccattcaataacatcttcatatgcttggcgtgttttatttttcggtggatcttgttgtctgtagccaaatgcaaccatcactgataaaccaaattgctcagtatctaagatacctttatttgctaaaatgtctgtcactgtatccagactaaaaccttccatcggacatgaatcaatacctaacaatgcggctgtcgtcatcatattgcctaatgcgatatacgtttgtttacttgaccagtcatacaaggcttgatcattatcagaaatatggaaatctgcttggaatgcatcgaatttttgttcaacagctgggatcgtttgtgcctcatattttttaatatctcttaacatatgttgtacatacggtgatcttgacgttacatttttacgcgcaaaaattagcacaaaatggctcgctgtatctaattgttttgctgcgccccaactgtgcgcttttaattcatcacgtaacgcttgatcttgaatcacgacaaacttccaaggttctaacccaagagaacttggagacaatctacctgactctaatattgtttcaaaatcttctttcgaaactttcttttgtggatcgaattgcttagtcgcatgtctgaaatgaaatgcatccataattgtttgattcatattgctcattgaacgtagcctccaatttttatatttattactatacaaattatacttcatgttttaaaaagactaaagtaatccgtttgcaattcactataacttgtgcacatgttataagttttctgcaataaaacacacttttgaattttggaaaatttagtgttataatatatttgtgatatttttcacaattaaattgtggcgtgattttaatgtacataatctttaatttcactcatttacttttcaatcttttaaaagcgaggtttttaataatgacaaaaattatgttctttggtacgcgtgattatgagaaagagatggcattaaattgggggaaaaagaataatgtcgaagtaactacttctaaagagctattatcaagtgctacagtcgatcaattaaaagattacgatggcgtaactacaatgcaatttggtaagttagaagatgacgtttatcctaaattagaatcttacggtattaaacaaattgcacaacgtactgctggatttgatatgtatgatttagatttagctaaaaaacacaacattgtgatatctaacgttcctagttattcacctgaaacaattgcagagtattctgtttctatcgccctacaattagtgcgtcgcttcccagatattgaacgccgtgtacaagcacatgattttacttggcaagcagaaatcatgtctaaaccagttaaaaatatgactgttgcaattatcggtacgggtcgtatcggtgctgctactgctaaaatatatgcaggatttggtgctacaattacagcttatgacgcttatcctaataaagatttagactttttaacttataaagatagtgttaaagaagctattaaagatgccgatattatttctttacatgttccagcgaacaaggaaagctatcatttattcgataaagcaatgtttgatcatgtgaaaaaaggtgcaattttagttaacgcagcacgtggtgcagtcatcaatacacctgatttaatcgctgcagtgaacgatggtactttgttaggtgctgcgattgatacttatgaaaatgaagcagcatacttcacaaatgactggactaataaagacattgacgataaaacattattagagttaatcgaacatgaaagaattttagtaacaccacatattgctttcttctctgatgaagcagtacaaaaccttgttgaaggtggtttaaacgcagcattatctgtcattaacactagtacatgtgaaacacgtttaaattaatatatatttaaaagcaaaggcgcgccatgtgcctttgctttttattttgtatatctgtataaaaaccagtttgattaaaatccgctttattttatcatctattcaaatgattttagtgcgcttattttactatggcattattgcctaacgtgtttgagatatattaatatttgattattcgtattcaaagttttcatttaacatgtatttagtatcataatagccgcttcattgatgatgtactacctacttgttcaatacttcttgttcgataatcgttaaaacaccctgcttatcattacttggagcgacagcagaggcaatcttgaacaattcttcatcatgactattttccatcacataactatgcttagcgaacgcaagcatatctttatcattattcgcatctccgaaggccatgagctctgaagaagacattccccatttatctaacaatcgttttaatgcctgccccttagtcatgtttggcataataatatcaatgctatcgtgcccacttgagacaagtttaatatcattgctgaattgcgttgctacttcttcgtcaacatttggatgcgtctcacgattaatattaaatgctattttgacataatcatcctcaggtaattgttgtagactgtcaatttcttttaactgatgataataaaatctcgtatcttctttaaatgcttcagaagtatgttttaaaatatacgcgcttttcaaaccacagatgacgagttgatcaatactttggttcatatttaaataatcgacaacctgttgaaacacctgacgattaaagcttttataattatataactcattgccattataaataactgcaccattttcagaaataaaatacatatctctatccccgaaaatagacttcaacttcgcatattgattgccactcgcagcaataaatgtaatatctctatttctaagttcagtaaaaatcgcttcaaatcttgatttatcgtatgtctttttcgaatctaaaaacgtcccgtccatatctaccgcaatagccttaaccatgattatcctcctcattgctcttttagtcgtcttcattatatccatctcatgacaagcaatgaagtttgtcataccacaatgaacctatattcacattttgaaattgctttcatatatgcaaaacacattacactggatatagcattcagaggcgaacataaatttcagaatattgtaaaaatataacgatatatttatcatttggacaaaatatagtgtgatatactaatttataacatctatacataatgtgaaagaatttttaaaaatacaattaaatatcggtgtaataaatccctttatacataggagttgtatacatgaaactaaataactattctttaaaagttaaaaacaaacaactagttgacaattgtgatttaaatttctatcttggtcagatcaatcacattgttggtaaaaatggtgtaggaaaatctttattagctaaagatttcttactaaataatagtggaaatatccctaagtccatttctcaaaatgtaaccttaatatcaagttcatcaaatattcctaatgatataacaaaagattttttattatcattgttaaaatcaaaatttgaaaacaatcgacaaacattcgataagatttataacatactaaacatcgaagcaataccgtctaacgtactactaaaaaacttgagtgatggtcaaaaacaaaagcttaaattattaagtttcttattggaagatcatgatttaatcatattagatgaagttacaaacgctttagacaagaaaacagttaatgaaatttatgaatttttaaatgattttattcaaagccatcaaactaaaactattatcaatattacacataatttatccgatttaagtgctttgccgggtaaatactttatttttaaagaccttcaaatagaagagtaccaatcaaaagaagaagtcataaatgattacattaatttataattgaggtgtccactttgaaattagaatttaaaaaaagtatttccaataaaattatttacacgcttggtgtgctattcatattccttttcttacttgggtattttttaccaataggaatagacaaagttaaaagtttaagctatagccagtttttcttcagttcatatactgttgcaacgcaattagggttcttactattttcatttgttattgcatattttattaataaagagtattcgaataaaaatatattattttacaagctgattggcgataatatctttaccttcttctataaaaaggtagcagtgttattttttgaatgtttagtgttcataattctaagtatcactattatttcaattatatattcggatttctcacattacttactattaataatcttattttcactcgttatcttacaatatatcttagttgttggaacgattagtatggtttcacctaacattttaatcagcttaggtatcagcattgtatattggattggttcagtcatcttagttgccattaataaaaatatatttggtatcgttgctccatttgaggcgagcaatacgatgtatcgtgccgtagaaaaaatattgaataacgagtcaacatttatgtgtcctactgaaattataaatacagtatcattcttcgttcttctatttatagttaatactattgtcttattactaagtagaaagagatggttgaaaatcggtatgtagtataaaaaaggagcggtatacattgccgcttctttttattatgtatttttacaatatccaccaatgacacgtcgtcattgttgcctcacaccaaacaaaaaacagtctcgcaatcaagactgttttccactcaatatattcatccattagcgtaatggattatttaacttctgtagctacaaagattttacgtgtttcccaaacgcctgtcttttcattgtaatcatcacaagtaattaatgttaattgtttatctttacctttttgttcatctagaacttctacatctgtaggcttaacatctcttatacttgtcattttatacttacgtgtttcattaccaactttaaagtacaccatactaccttttttggctgctttaagatttgtaaattgatagttcggacggtcaatgaaagtgtgtcctgcaattgaaatattttgatcatctagtgattcgttttcttctgcaaagcttacacctctatttaattgttcaggtgttgctggtcctggataaactggttctttaatatcagcatcgggaatttcaatatagcctgccactttcgatttatctttcggaatttgaggtttagcttgctgctttttatccttactcgcctgttcttttacatttttatcatattgttcaatcttttcatctttatctttatcgtgaagataattatcgatatgcggtttagcaaacaaatatgctgccactaggataagtaccacaccagcgattgtcattaatcgatttgtccattttttcatacgttaaggctccttttatacatttcacaatgcctattaacatttcatatagtataccattaatttcaaaatgactcatagcaattcattttatactataaaatttacatgtatgcttttacgttagatttcattacacatatttgcattcaaataacgaaacgcttttaataattactaagggggaactattatgattcgatgtgctaaaaaagaagatttaaacgctatattagcgatatacaacgatgccattattaatacaacagctgtttatacttataaaccgcaaaccatagacgaacgtatcgcatggtttgaaacgaaacaacgtaatcatgagcctatctttgtatttgaggaaaatggaagtgtattagggtttgcgacgttcggttcgtttagaccttggccagcatatcaatatactatcgagcattctatttatgtcgatgcttcagctagaggaaaaggtatcgctagtcaattattacagcgtttaattgtagaggcaaaagctaaaggttatcgtacacttgttgctggtattgatgcttctaatgaagcgagtattaaattacatcaaaagtttgctttcaagcatgccggcacactgaccaatgtaggttttaaatttaatcaatggttagatttagcattttacgaattagatttacaagactagtaatgtttgaatcacataatataaacaagacgaccatgtcaattcacttaacataacaagccaacatataaaattttaaacttctcaggggagtgagacagaaatgataaagagccactaatgatttattatgtagtggttcttacacattagccacagctaatgtgtacttaaaaataggaatacatgagtaaaactcatgcataagaaatactaatttctatagaaaaagtatttctttatcgtcgtcccaccccaactcgcacattattgtaagctgacttttcgtcagcttctgtgttggggcccaaaaagcttgttataagcgcttttttgttcagtcaactactgccagtataactttgtagagcatagaacattgatttacattgtcccttttattttttcttttcaaatactatccccatagctttgatttaacgctttttctcaataacaaaacgaatatagtagaacatgaaaacgataatcatgctgagcgataaagatttaaataatagattgacccacgttccctcagtcgtatatccatatgtaatcgttgtgttaatgatgaatgctataaagatgattgatagtcttagcatatcatcactccttttaagttattttagatatacgggggcgcttttgcaatcactattttgattagtatgcattttccataaatctttcaacttcttcagagataattaagaagcatctatctggtactaatgatccagacagatgcttcttttttatcaatattttattgttatctcattaattatttttaaccatatcttcagctgtgccaaagattttacgtttaattgcttcgccagttggtgtgcctgctagtccacccaatccagtttcacgtaatgatgcaggaaggttacgaccaaccttatccattgcttcaataacttcatcaacagggattctactttcaatacttgctaatgctaaatctgctgaaattaaagcgttacccgaaccaattgcatttctcataacacaaggaatttcaacaagtccggctactggatcacaaactaaacctaataaattacttatcgctaatgccatagcgtgcccggatgcttctggtgatcctccgaatatagctactgctgcagctgcggccattgcagatgctgaaccaacttcagcttggcagccacctgttgcaccagctacacttgcattgtttgctacgacacgcccaaacaatgctgaagtgaataagaaatcaatcatttgctcttctgttaaatcatgtgttttttctaatttaaaaagtgcaccgggaatggtacccgaggaaccagctgttggcgttgcacaaataatacccatcgcagcattgacttcatttgttgcaatggcacctttgactgcgtcaatcatttcatatccagacaaagcatgatgtgtttcattataatcacgtagtttagcagcatcatgaccagtgtagcccgttacactttcaaccccatcacctgtcgtccctttgattactgcgtctcgcatgacatctaaattttgtttcatttgcgctcgcacttcatcacgtgatttaccgcttaattccatttcttctttaaccatgatatccgcaaatgacatattattttctacggcataatctatagtctctctaattgaatcaaacatgtttattccccctctaatttatataggaaacgtttacgtcactgtatttctctttaattgtatttaatgttgattctgagattgctttatttaatggtattacaaccaagcatttatcttcatctatcttaataaattcatctttacagtctaatttcatatcgttgatatcattaatgaaatgatttacttgtgctttagtcatatttccgtcaacaactaaaattggtaatccatgatttaaatctacttctagtccatttatatgaatacctttaattttaattgtaccaccaccgattgaaataccgataatttcaatgtagcgaccatcattacgagatgatttaatataagcacagtttggatgttgaccaatactatcgccttcttcttcgatgatatctattttaataccatcatcagctgcaatttctaatgaagatttaattcggttatcaaatgttgaatatcccattgctccacccacaatagcgacatctgtaccatgtccttggtgtgtttgagcaaatgattcataataatgtatttcaatatttttaggaatatctcccaatattgcgcgtgctgaattcccaatctttactgcaccagccgtatgagaacttgaaggtcccatcataactggtccgataatatcgaaagcactttgataatcatagctctttgccataattaaacactctccttaatatgattctttttgctcggcattttaaagttgatattcattaaattaaacttattaattagtgttccaataatataggctaagacaatgctgacaataatcactgttgcgattgttacaattgatgtcactgcattattaaagccaaacaatacgatggcgcctgcaattggtgttgccatacctttgacacctattactagtccgctaaatgtcacgatacatgcgttgacgaccccaatcagtgcatttgtaccatatagttgtactggatattgcgctattaaatcaatttgcgtcaatggctcaatacaaactgcaaatgcttttgacggtccaccaatgtttaattttcggaataaaataaggttaacaaatgagctacctgtacatgttagtgctccaatagccataggaacacctgtcagtcctaataaacttgttaataccattgaacttagcggtgtcatacctgtaacaggaatcactagtcctaaaatgaccgctaatgcatatggattgttatcacctaccgcagtgacagcactacctatttgttttaatgttgctagcacaccaggtgtaatgattgatgcaagtccgaaagcaattgctggtgcaaataagatcaccacaattaagtccaagccttctggaactttcttttcaatccatttaattaaaaaagctacgccataagctgcgatgaatgctggtaataatttaaagtcatgtaatactaaaccaacaatgaccgcaaatactggtgcaacgcctaagtttaagcacgttagaatacctactgcgataccgcttaaacttcctgctaaatccccaatatcttgtagaaatttaatatcaaatacgccaccaatagcataacttaagaatgcttgtggtagaaatgtcgcacaagctgcaccggataatgcttgtagtccttgtttaccgtacggtgcatactttaaaaatagcgtcatgatcactaaaaccaagactaatgtgcctacacctaacagaatatccatttcccaaaaacctctctctatgtttattttattttcagaccataaacatcgtacacccttaagaaaacgttttcaacttttatctgttatcaaatcaaatatttaagtgaaatatttcatatttgtgaaagatttttaaaatggattgtttcaaaaactacttatgttgtcgttaatatttactaattaactttttactctatatttcaaacagttgtgtgacagttttttgataactttttttacatctgaaagtaagtaatatttctaaaaaattttaatatttatacactttatctttcgagctatttattttttgtttttgtgccgtgtttataaaaccgcacactatattcaaaaataacttattacacatatatttgcaataagataattaaagtaggatattatttttagttttctgataggaatgatgatagtctataggttgaatctttactttttttaaagctaaatttacatcaacttaacaatggttggttatactgaagatgaaaatatttagtataacttagtggaggcgataaaggtgcaattgagtcattccgttaaagttgcaatttctatctatttagcacttatctttataacgttcacttcttatttagtcattattttatatacgagtatgactggacatgatgtatcacatttcgtgttagatagtcagcattctcatcatggatctcttacgcaaaaacatttgagtcttcctgaaatctcatttaaatagtttatcctctgtgtttcaacattcatttcccatatcgattcatttatctatcatctagaccactacatcttagatgatttttttattttctcatttcactctttcttaaaagtcgatataatgaattaaatcattatcatacaccgacatattttatgttgttggtgttaagttttaaaggggtgagatacttggcgaacaatcattcagctttgcgtttaaaaggaattatacttgccattgtcggtgcttgtttatggggattaggtggtactgtttctgatttcttgttcaaatataagaatattaatgtcgattggtacgtcactgctcgacttgtagtcagtggtgttttcttacttattatgtacaaaatgatgcaacccaaacgttctatatttagcgtattccaagatcgacgtatgttaggcaaattacttatcttcagtatactgggcatgttagttgtacaatatgcttatatggcatctattaatacaggtaatgctgcgattgcaacattactacaatacattgcgccagtttatattattatttggtttgtcataagaggcgttgcaaaactaacattatttgatgtgcttgctattatcatgacactattaggaacatttttattattaacgaatggttcattttctaatttagtcgtcaatcctgcaagtttattctggggtattttagctggtgtagcactcgctttttacacaatttatccttcagacctacttaaccgcttcggttcgattctaattgtcgggtgggcaatgcttatttctggtgttgcgatgaatttacgccatccaatttggcacattgatatcactaaatgggacatatcaattatattatttttaatctttggtattatcggtggtaccgcactcgcattttatttctttatcgacagtttacaatacatatcagcgaaagaaacaacattattcggaactgttgaacctgtcgtagccgttatcgcaagcagtctatggttacatgtggcattcaaaccatttcaaatcgtaggcatcattcttattatgattttaattttattactatcacttaaaagacaacctgaagcattagatgaataagaaaactctgataatcactttagcaagtaactatttttaacaacgtagctaccttgtatgtgatatcagagttttttattttaattaataatatttttcacttggtataaaaagcgtcggcgctctggtatcggaaatactggataaatatggaattggtaatatccaggtataaagtcatgttcgataccttttgcactcaacaattgcgataagttcaaagcatctgggtacagtacttcttttgtgccaacagttaatgtaatacgacctaaaccatctaagtcaccattaattggtgatactttgtagttatctaaaggtgtgtcccctgcccattgttcagctaagaacacactgccatccacacctaccattgggtctttctttaagtagtcaggaatttcaggatgctgcatcgttgcatctaaaactggtgaaattaatacaatatgtcctggttgcacaatatgtttttcttttaacaattgagcaaatgataaagcaatttgaccgcccgcagagtcacccattacaacgatttgtttagaatctgctacttgattcaataaatcatggtataacttttcaaaaagcacatacgtcgcttgataatcttgatgcggaatcttcggatatactggcatgatgactttagcattgagtgtttctgcaagttcatcaataaattcgaagtgaattttaagtgggtcttggaaccatgcgcctccatgtgcgtataatacaacacgttgatgcttatcttgtttatcattaacggtataaacggttgaaccgtagtgcttatccactgttactggcatcttaaactgataattggtgccctcatattcacctgctgtctgtggcgccattttttctaatgctttcatcgcttcttctttatacataaaacgacgcttagctctagataatcgtataccttgttctaacatataacttttcacactgcgtttttctttaattctaatatgtgcgtatgctgctactaaaaatccaaacgcaagtgtagaccattttttacgcatttgtcgtcactcctctttgatgatttctactatagttctactgtaccatgctgattcttattactaccaatatttactgggaaataagttatgatgtctacataatcttagcaatgctaatcatttgcgatattaatgctcatcgacatcgttatttacactatcattcatttgcttaagatgatgttcaaaacgttgcatatcgataaaacgcccttgacgatgcatttcttttccattcataaaaattaaatccacaggtacagtgaaaatatttaattctccagcaatagcttccacctgactttgattaatcacagctaatggcacattgggatatgattgcatcaagtcttcaatttgtggtaaaacggcatgacacacgctacactgatcgcgcatgacatgtacaactgctaacggatattgatgaataaattcacggaatgcttcgacactatttaattgcttaaccatttcgaacaccttcttactttttatattttaaaatgaagtcattattttgttgctaaaatgtcttgaaacacttgtggcacagaggttatcttcttatcgctcaatctgtaaaaaccgcctgtctgtgtaccaatacaatgcacgccatgtgcggacacaatttcaaactgaaacacccatttcatcttgcttgctttaactaagtaaatacgacctactggtttgtcatgtattgtgacaggtactttatactctgcttccgttttcataagtataggtgaaatgccttgattgatcattgttgagtaattcatgtgctgattaataaacgctgttctcaaatcttcgaaccatctaatataaacgatattactaacgacacccatcgcatcaatgtcgtaaccattcacttcgatttctttctctgcaactaatagaccttctgttgtcataatgacaaatctccttatcttacaaatagatttaaaatcatgttaatttatttttattactttcatgataaaaatacaagcaattgaactttattacggaaaatcaaacttttcaatgacgttattaatttgactagtcgtgaagatgcatttttctaaaatgtacaaaaagtacaatccctactttctatcccccaaactaacatctatgccattgctatacatcattgcgcactaaaaagacagcagcttcattttaagctactgccttttgtaaaaatattctctttcaactcgctacttcgcatacgcactacgaatgactaaaagttcattcatttgatatgctgtttcatttttaatcattatttgactgtcataattagcttacctggatcagcatcttgtacatcttcaatgacaagttctttattttcaagatttgtaataatcattggtgtaacgatgcttggtgcgtgtgctttcaagtatgctaaattcactttcattaatggttgaccttgtgttactttttcatcaacgttaatcagactttcgaatccttcaccattcagtttcactgtatcgataccaatatgaataagtacttcgacaccactttcagattctaatcctattgcatgtttcgtagggaagattgttttcactgtaccatcaaacggtgctacaatttcacctttttcagggataaagccaacaccatcacccatcattttaccagcgaatacttgatcaggtacttctgataatggaatgatttgaccgacacctggtgcatagatgtctgttgttccaagtgcttctacgtgaactggttcatctgacatttcttcagtcactgtcgtttcacttggtttcgtaatttcaccactcataatcttggccatatcatgtttaatttgatctgattttggaccaaagatagcttgcatattgtttccaacttctaatacacctgatgcgcctaaagctttaatacctgctacatctacttttgatttatcaaccacttctacgcgcagacgtgtaatacatgcatctaaatgtttaatgttttcttttccacccattgcatctaagacatcaaatggtaattttgcgacactagagttacgaatttcagtttcttcatcttcacgacctggtgttttcaatttaaacttacgaattgcaaagtcgaataagaagtaatacacgatagcatatacaataccgactggaataactaataatgcgtgtgaacgatcccagtttaataaaccatataaaatataatctatgaaaccacctgagaatgtcataccaattttaacgcctaataaatgcattactaagaatgatgtaccagctaataatacgtgaattccataaagtactggtgctacaaataagaatgaaaattctaatggctcagtgataccagttaaaaatgcagttaatcctgctgataacattaaaccacccacgacttttttacgttctggtcgtgcatttttataaatagcaaatgccgccgctggtaaaccaaacatcataaatggatatttaccagtagtaaatgcaccagcagtaaatggtacgccatctttcaattgtgccatccaaatacgttggtcaccacgaaccaattcacctgcgtgatttgtataacttccgaattcaaaccagaacggtgaatagaaaatatgatgtaaaccaaatggaattaatgagcgttcaataataccgaatataaacgttgttaatgttaaatttttatttaataagaaattcgataaactatttaatccatcttgaattggtggccacgcaaagcttaaaagcacacctgttgcgattgctacgaccgatgtcacaatcggtacaaatcgtttacctgcaaagaatcctaaaaatggtggtagtgtaatattataaaatttgttgtaacaccatgcggctaaagcacccatgataataccaccaaacacacccgtttgtaacgttggaatacctaatactaaagcatgtgctggttctttcgctgcttgacttaattcttttgcccctttggcatatgagaaaatgtcatcaattgtaatgtgcaacactttccccattgttgcattcataattaagtaacctactagcgctgctaatgctgcaacaccgtctcctcctgctaatccaagtgctgtaccaactgcaaataataatggcaagttatcaaatacaacttgtcctgctgcttccatgaccgacgaaatcattacaatgatatcgttttttaaccatggtgcaatttctactaattgttcgttgtgcattgcgttaccaaacgctaataaaataccagctgctggtaaaatcgcaacaggtaacattaatgctttaccgatacgttgcaattgtccaaacaatttcttaaacatataaacatcccctatctcaatttccgcttccatgtacaaaaaaagcaggcatgaacaaacaagactattctcatagtgcggttgtttgctcatgcctgcattaccagtaacacgcaagtgatatctaattcatagctattatacatatttgtaaaagcgttttcaacaactttttcacaattttatcatcaattcagtacgatcatttgtgataaataaacaaaacggcaattcccattttgttgaaatagaaattaccgtttttatagttcaattcaattgtgataacctttaaatcagttataagaaacgttttgctgccactgaaattggtggaatttgatctaaatctaaatgcttatcttcagtaattgatctaaatgcccacttaccataaccaagcgcttcttcatttacaattttacctggtaatggcgcagcattaggatcaacatatacatctacaatcgttggtacatcttgtgctaatgcctcttcgactatagcatctacttcgctagcactcttaattgtataacctttaccacctgctgcctcagcaaattttgcatgatccatatcagaaaaatcaactgcatattctaattcaccagctgcttgttgttcatatttaataaatgctaactgtttgttattaagtacaaatacagttaaaggtaaatcatattgtactgctgtagcgaagtcttgcattaccatttggaatgcaccgtcaccagcaatggcaatcgcttgtctatttggatatgcaatttttgatgccatagctcctggaagaccgcaacccattgtacctaaccaacttgaaatgatgaacttgttgttcacaccaagatttaaataacgtgtagaccaaactgttgcagtaccaacatctgctgaaattactgcatcatctttaataaatttgttaattgatgccattaaacgttctggacgtaatggtttgctattattatttttatcttgttccatccatttatcccaaaccgctttacgttctaacgttttgtttaaaaatggtctttccgcaacatgtttaatattttcagttaactgatgcaatgcaattttactgtctccaacaattcctacattaatattaaaacgatgtccgatatttttaggatttgtgtcgatttggattgctttaatatttttcttaggtaagtaatctacatatggatagtttgtacctaccataattagtaaatctgcatcctgcattgtctgatatgaggtttttgtacctattttacctaagttaccaatactgtatggatggtcatccggtaagattgtcttagcaggtaatgaatgaacgaccggaatttttgccgcttcaacaaacgcacgtagctcatctttcgcatgttttgcaccaacaccaatcaacataaccggctttttactcttattgattaatttaacagcttttttaatgtctttatattttggtgatacaacagttggtcttgatgtatctactggtttattcgttgtatctttaattttttcagttaataagtcgttaggacaaataacaacagctacacctttttgttcatatgccgtacgaattgcttcgttaacaatttcaaacacattgtcacctttttcaatttggtgattataaacggctacatcttcacataatttttgtaaatttgtttcttggaatgctttcgttccaagtgctgtactattcgtttgtccagataatattaattgcggtacattatccattttggcatcatacataccatttaataaatgaattaaaccagggccaccgatacttaatgccacaccgattttaccagttaattttgtgtaaccagcagccgctaagcttgctacttcttcatgacgtacatgataaaatttaaattgatctctcactgtacgtaaactatcgactactgcgtcgattgagtctcctggaataccatacaagtgatctatatcccatgcttgtaatgctttaactaatgcttcatttgcttttatttttgccattattactaatagcctccctttctgtctatcattttaaatatctaaattaatagaataataaaattagaacaggtattaacactgaactaataactgcagttaaaatcatcccaattgaactaaatgcaccggattcaatatccatttctagtgctttagctgtgccaaatgcatgtgacgcattcccatacgttaaacctttggcgatagaagattcaaatcttccaaatcttaataacatcgaacctaaaatactaccgattaaacccgttgtgataataaaaagtacggtcatcgtatctgtaccacctagttcatgtgacacttcgatacctactgcggctgttatagatcggggcaataacgttacaatgacgtctttagaatagccaaatgctttaagtgttaagaacactaacatgaaattcagcatgacgccagttaatacacttgcaaaaatgatagagacattgtctttaattttctctctatttttataaagtgggtacgctaaacatacgaccgttgcgtttaaaatatggttgatccaactgccacctttcatatacccgttataactaattccaaagataagtaagacaaaaataattcctaaagatgcaattaatgctggattcaaaaatgggttcggatatttttgttgtaaccttttagcgaaataatataaaacgacagtcaacaaaatcattaataaggcttgcacgtaatcattcataagcgtctacacctttacgatgtttatgtttaacagacattttttcagcaatataacctgaagataatgcaacgatacatgttcctataataatgactgcgaaaaagagtatataatttagcgtaatttcggaagcaacatccataatacctacaactgacggtatgaagaaaaagaccatcgtctttaataaaaagtttgcaccgtcttctacccaagttagcggtacaatcttaaattgtaatagtaaataaaataaaaatagaccaacaatactgccggctaagggaagatgaaaaatcttttgaatttctgtgccaatataagtaatcacaatgatgattcctagttgtagtagtagtttgattattaattggactttgtgcatggcgccatccctttctaaatatgtctaaattgttacaataactattataaagatggcgtacacaatataaaaatactctttttttatagtttgtattactattttctatggaaacgctctctcaatttcacttcattttcacaaaaaaacactcatcatttcaatgacccacgtaatgatgcgccttaaataatgagtgctttattaatatgttagcctaaacgatctttcaaaaattctatccatttcgttgtggcatgacttaattgtttatccttcttccaaacaacacctaattcccaatgtacatgcgcatcttcaatgcgtagcagcttcacatctccatttagttgctctgaaattgatgttggtaaaatactaatacctaattcattcgtaactaaatcttctataacatgccattgtgaaatttgcgctacagtattcggaacaaagccaacgtttttagcattttcaataattttatcattcaagtaaaagtctttattaaataaaatgaagtcttcacctgctaaatcttcgagtttaacagtttcatattttgcgagtcgatgctctctgctcacgataagtcgcaaatcttccttatctagggtagtataatcgaaaatatgatgatcgactggcaaagtggtcacgcctatatctacttcatcattgataatttgctgttcaattgttttaccgccattttctatcaaattatatgtaacatttggatattgttgatggaatgcaccaagaatattgataagaatcttcatattcatgactgccgacatgcccatgtttatatgtcctgtttccagtccattcaagcgttccatttcagatggtaaataatcatacagtgcaacaatttctttacttttctcataaaaaatttgacctgcatcggtaagaattaaatgtcttttacttctatcaaataagggcgtgcccatttcattttcaatatctttaattgctttactaattgtaggttgtgcaatatataatgatttggaagcattagtcatgcctccttgcttaacgacttcaataaaatatttcatatgtttgatatccactaacatcatcctaactatttcaacacgtttatttcattatacacaacttcttaaacattcaataaatttagatttataaaattgctttataaaaagttttatgtaaaatacacattcttttatggtattatattaatggctcaagtatattaatcgaggtgaggtattgagcttttacgaatttatgcaaagttttcttggtgatgacacaccattaggtgaattggttgattggattaatcaagatagcaatttccctagagaagtgaagagccatagtgaaatattgtcatattttcgaacaaatccatgtcctgaaagcatctcagtacctgtaattaaacgggcactatcagttttcaaccaattcacaaatgtacaatgatacatgaatacatggagtcacatcatctcatgttaacgctctgattgcagggcgctatttttaatgttattgctacatttagtatattgtgattgctattttctttcagttatagaaccacgtaccttttcttttaaatcattttatattttcccactaatatccgctgttaatcaattctgacatccttgtatcactatgacaattaattgttaaatacatgaatttctacattttatgaaaaaatccatttttattacaattcaacactttatatgacaacttcattacagttacttttattgttgattgcttgcattgttttctaaaaaaattttgttatcataattaacgttgaataaagaaaaaaattaacttgggagataaaaatggaatataaaaagatactaattcgtttattaattgcttttgcagtacttttctcagcagatttcacttatcaatccgtcgaacaaacgcatcaatcgcatgccgcagttaattattatagtaaaaaccaatgtacatggtgggcatttaaacgtcgcgcacaagtcggtaaacctgtttctaatagatggggcaatgctaaaaattggtattacaatgcacgtaaatcaaaatatgcgactggtcgtacaccaagaaaatttgctgtcatgcaatcaactgcaggatattatggacatgtcgcagttgttgaacaagtatataaaaacggtagtattaaagtttcagaatacaacttttatcgcccattaaaatacaatacacgtgtactaagcaaaaaggcagcacgtaactttaactatatttactaatcaaaaaacttctatcacgaacgcttcaatttcctgtatgcgtgtgatagaagtttttatttttgttcatattaatttatctaagcgctacgatggactgacctaaacttttctttaaaatcgctatttgcaatttactattgttggcttcttaaatcttgtaaaatacgttccgctgcttgtgtatttgcacggggttcttttttcaaagcttcagctactttagcaatttcatcaccttttgctcctacaacaatagctaatgatttatattgtaaactcatatgaccttgttgaataccttctgacacaagcgcgcgacatgctgcaaagttttgcgctaaaccaacggcagcaactacatgacctaattcttgtgctgactctacatttagtagctctaatgaagctttagctattggtaatactttcgtaccacccccaacaattgccaatgtcataggcacttcaattgtaccaatcaatcgttgacgatcttgatcgtaacgccatgtagcaataccacgatactgtccgtcacgacttgcgtatgcatgcgcacttgcttctgcaccacgcgtatcatttcctgttgctaaaacaacagcatgtatgccattcataacacctttattatgtgttgctgcacgatgaatatctacttgtgccaatacagaagcacgttccattcgtttggcaacctcttctccagttctctcgccccttgctaaatctttaacatcaatttcgccttgaactttaacaacggacgctgttgcatgattggataaaatactcattaaaatgtcgctttgcggaaattcattttttaaaaatgcagttatggcctctaaaatcgtattaagcatattagcgcccatagcatctttcgtatcaacaaatacttttaaagatagtaactgttgctcaggaaatgtatcaatcgctatacgttggtaaccaccaccacgcgctttaatagaaggatatgcctcatccgcaattttatgaatttgcttttctaaagctttaatgtctgctgataatttttcagtatcgtcaacgccatcaaagacgatttgacctatcataatacgttcagaagataccgttttaaatccgccagtctgattcactagctttgcaccataactagctgcagcgacaactgaaggctcttccaccatcataggtacaacatatgccttatcgtccacaatgatattcggtaataatccaacgggtaatgcaccttgcgcgatgacattttcaattaaactattggctacttcttcatcgattaatggatgattcagtaaaatgtcgaattgttcttctgataaccattgcttatcaaccaattgttgtaacttttctttacgagataaatgtcgaaaattcttatctaaattttgcatggacgtactccttttacttcacataatttttaacatttcaatcactactatttttaccacaaaataacgtcattcgtcttaaaattcaattgaataattgtcgttttgactttaaaataaaacaaggtaaattaaaacgcttacaagaaacgacaaatcatttttaaatttagtatatttctttgtataaaattagcatattctgatatgatacaagtgttgcttttataaatttgaaaggatgtaaaaccttatgacaataggtatcgataaaataaacttttacgttccaaagtactatgtagacatggctaaattagcagaagcacgccaagtagatccaaacaaatttttaattggtattggtcaaactgaaatggctgttagtcctgtaaaccaagacatcgtttcaatgggcgctaatgctgctaaggacattataacagacgaagacaaaaagaaaattggtatggtaattgtggcaactgaatcagcagttgatgctgctaaagcagccgctgttcaaattcacaacttattaggtattcaaccttttgcacgttgctttgaaatgaaagaagcttgttatgctgcaacaccagcaattcaattagctaaagattatttagcaactagaccgaatgaaaaagtattagttattgctacagatacagcacgttatggattgaattcaggcggcgagccaacacaaggtgctggcgcagttgcgatggttattgcacataatccaagcattttggcattaaatgaagatgctgttgcttacactgaagacgtttatgatttctggcgtccaactggacataaatatccattagttgatggtgcattatctaaagatgcttatatccgctcattccaacaaagctggaatgaatacgcaaaacgtcaaggtaagtcgctagctgacttcgcatctctatgcttccatgttccatttacaaaaatgggtaaaaaggcattagagtcaatcattgataacgctgatgaaacaactcaagagcgtttacgttcaggttacgaagacgctgtagattataaccgttatgtcggcaatatttacactggatcattgtatttaagcctaatatcattacttgaaaatcgtgatttacaagctggtgaaacaatcggtttattcagttatggctcaggttcagttggtgaattttatagtgcgacattagttgaaggctacaaagatcatttagatcaagctgcacataaagcattattaaataaccgtactgaagtatctgttgatgcatatgaaacattcttcaaacgttttgatgacgttgaatttgacgaacaacaagacgctgttcatgaagatcgtcatattttctacttatcaaatattgaaaataacgttcgcgaatatcacagaccagagtaatctgtgtatttgaaagacatttaaatataacctaaaaacagcagtaagaccacttctaattgaaatcgtcttactgctgttctctatttataacacttcgtattgaatgaattcattatgcctatttgacacattattgaagttttcctaatgcctggatcctttatacgttacggctttgtactgtgtttaggtacataaagctttgacatatcgatattctccaactctaacagcttaattttattattaatcgttccaccgaatcctgttaagctacccgttttaccgacaacacgatgacatggcacgataattgataatggattacttccgactgcacctccaaccgcttgggctgacatttttggcttgttaagtagcttgcctacttttttggcaatagcaccatacgttgttaacgtcccataaggaatctgtcttaattcattccaaacacactgttgaaaatgactacctgttggctttaaaggtattgtgatttcaggattgtcacctttaaaatacgcgtctaaccactgtgtcgcctctttaaatatcgctaaagacgtattttcttccctagtactatcaccttgttgattttcaaacaaaacagcggtcagacttcccccatcactcacaagttccaatcgtcctacaggcgaatcatagtaactcttatactccataaaaatgccccctttttctaatcatacgccttaattgttaatttagaaaatattcatgttcacattttttaaaaataaataagtcgtcaattacgtatataaacacgtaataccagctatcactttgctgcaatatacagttacatatcttactacacgcgctaacctcttactttgtaaaccaaatcttaaattaaaatattgaaaatgcaatgaatccttaatattttattaaacctataattacttattaaaaataacacacaatattcataaagttttaaaaatattctgtttaatcatctattattagtggaaaaatataagagcaattgtttatagtttgcataacgcttcaaaagtattttcttttttgtttagttcaaaaaaatttagaggtgatgttatatgaataacggttttttcaatagcgactttgattcaattttccgaagaatgatgcaagatatgcaaggttcaaatcaagtcggtaacaaaaagtactatattaatggtaaagaagtttcacctgaagaactagcgcaactcacacaacaaggtggcaatcactctgctgaacaaagtgcgcaagcttttcaacaagcagcacaaagacaacaagggcaacaaggtggcaacggcaattatttagaacaaattggtcgtaaccttacgcaagaagcacgtgacggtttattagatccagtcattggtcgtgataaagaaattcaagaaactgctgaagtcttaagtagacgaactaaaaacaatcctatattagttggagaagctggtgttggtaaaactgcgattgttgaaggtttagcacaggcaatcgttgaaggaaatgtaccagcagcaatcaaagacaaagaaattatttctgtagatatttcatcattagaagctggaacgcaatatcgtggtgcttttgaagaaaatattcaaaaattaatcgaaggtgttaaatcttcacaaaatgccgtactattctttgatgaaatccatcaaattatcggttcaggtgccacaggaagtgattcaggtagcaaagggttatctgatattttgaaacctgcattaagtcgtggtgagatttctattattggtgcaacaacacaagatgaatatcgaaacaatattcttaaagatgctgcattaacgcgcagatttaatgaagtacttgttaatgaaccaagtgctaaagatactgttgaaattttaaaaggtattcgcgaaaaattcgaagaacaccatcaagtaaaattaccagatgacgtattaaaagcatgtgttgacttatcaattcaatatattccacaacgattattaccagataaagcaatcgatgtgttagatattacagcagcacatttatctgcgcaaagtccagctgtcgataaagttgaaactgaaaaacgaatttctgaattagaaaatgataaacgtaaagcggtaagtgctgaagaatataaaaaagctgacgacattcaaaatgaaatcaaatcattacaagataaattagaaaatagtaatggtgaacatactgctgttgctacagttcatgatatttcagatactattcaacgattaactggtattccagtttctcaaatggatgataacgatattgaacgtttaaaaaatatttctaatcgtttaagaagtaaaatcataggtcaagatcaagctgtagaaatggtttcacgtgcaattcgccgtaatcgtgctgggtttgatgacggcaaccgtccaattggcagtttcctatttgttggccctactggtgttggtaaaacagagcttgctaaacaattagcaattgatctatttggtaataaagatgcactgattcgacttgatatgagtgaatatagtgacacaacagctgtttcaaaaatgattggtacaactgctggttatgtcggttatgatgacaattcaaatacgttaactgaaaaagtacgccgtaatccatactcagtcattctatttgatgaaatcgaaaaagcaaatccacaaattttaacattgttattacaagtaatggatgatggtaatttgactgatggtcaaggtaatgtcatcaactttaaaaatacaattattatttgtacatcaaatgctggctttggcaatggcaatgacgctgaagaaaaagatattatgcacgaaatgaaaaaattcttccgccctgaattccttaaccgcttcaacggcatcgttgaattcttacatttagataaagatgcattgcaagatatcgtcaacttattattagacgatgtacaagttacattagataaaaaaggtattacgatggacgtttctcaagatgcgaaagattggttaattgaagaaggctatgatgaagaattaggtgcacgtccattaagacgtattgttgaacagcaagtacgtgacaaaattacagattattatctagatcatacagacgttaaacatgtggatatagatgttgaggataacgaattagtcgtaaaaggtaaataacgacactttaacatatcgcgcatcaaaaatgagcatcaggtcgcccttgcctgtgctcatttttttaattatttccctggaaaatgattcgctgtgtgctgttctgttccacaacaatcacgattaatgtcacatgtaccacattttccttgtttcgaacgtttgaaaaatttcactagtgtatacaaggcatatccgaaaattgctaaaaaaattaaaatgttaataatgactgacactttaaccactccttaaacaaataaatgtccgacttgataaaaaatgaatgttaagacatatgcagtgactagaggataggcaactgcaagtgccgtccatttccatgaataagtctctttacggattgctgccactgtagaaacacaaggaatatacaatagtataaatatcataaatgcatacgcagatagcggtgtgaattgattttgaatcacattaacaaggcctgcatcacctgatgaatagataatcgccatcgaacttacgataacttcttttgctaaaaatcctggcactaacgtagcacctgcttgccatgttccaaatccgagcggttgcactaacataccaaagaaactaccaaccatatgtaaaaaactttgattgatattcacattgataccatgtggtcctacataacttaatagccaaatgactactgagccgccaaaaataaatgtacctgctttacgaacaaagcccttagccttttcccaagtactacgccacaacgttttaatggaaggcacacggtatgttggcaattccacaataaagattgcattatcattttttaaaatcgtcttagtaagtactgtactgactaaaaatgccataataatacctaaaacatacaagcttaatactactaaagattgattctctttgaaaaagatacctacgaacaacgcatacactggcagtctagcagagcatgacatgaatggtgcaattaatatcgttgttaaacgctctttttcattttcaatactgcgcgcagccataatactcggtacattacaaccaaatccgataatcatcggtataaaagacttcccgcttaaaccgaacgattccataatacgatccattaaaaccgcaatacgtgccatataacctgaatcttctaataaagatataaagaaaaagagcacaacaatttgtggtacaaagactaatactgatcctacaccagcaataatgccatctgtaattaaatcttgtaaaaatggtataacccctagataattcataatcgtcttcacactatctgtaaatgtaccacctataaatgcatcgagttgatccgacaaaggtgtgccaatccatgtaaatgtagtttgaaagatcaaccacataatcgctagaaaaataggcatccctatatatttatgtgttaatatcttgtctattctagagctgaaatattgcttatcttcatctggatacgttaccacgtcttgcaataacgtctcaatataatgattgcgtatacgctccatctctcgacgaacagatacagcccctacttgttcagcaacttgatcacgtaaactcgacaatttatttacaacctctgaattaagttcgtttgcaatttgcatgttatttaataagaattgaatcgcaataaacctagcttgatacttatcatgagatgtctctgtcattattatttgacacatatttttaattgtctcttcaatcttctcaccataattgattttaaaatgcggttgatacccttcccctagatgctttatttcgccaagtaaatgtttagttcctttgcctgtacgtgccacaactggaaaaataggtgtttttaactttttcatcaatttatgataatcgatttttatcccgcgctttgtagctacatcaatcatatttaatccgatgtatattggttgattaagttctaacaattgtactgttaattgcatatttctttttagttgactcgcatcaacaatgttaatgattcctgaaaatgaatcgtttaataaatagtctgtcactacagtttcatctttagaaatcggcgataaatcatatgtacctggtaaatcaattaattgtcctacattttctttaagtttccctacttttttctctaccgttacgccactccagttgcctatatattcatacgaaccagttaaagcgttaaacaaagatgttttaccaacattaggatttcctaaaataccataattttccattcgtccggctcctattcttctaatgcaatagaacaagcatcgcaatgtctaatacttaactgttgtccgtttacttcaataatacatggccctttaaataaacatttttgtttaatcgttatgatagcgtcatctgttaacccaaaggcacttagacgatacaacatattctcattagcaatatccattcgctttattttataagccttattcatttcaccatttttaatgtttaacatactatttcgctctcctattagaaataataatcattatcacttaaaaatcataacccttaaaattgtatctcgcaatactttatttaaataattttcatttttcatgtaaaatttgtgacattgcaaaaatgttttgtataatcactttcatgcaaaaaacctccgcttcaaatgtcattgatagacatttaaagcggaggcatgtacttgttgttttgaatttagttgatgcttgttttgataatctattaaagcatcatataagaaaaatgaacttgctgattgctgtttcacttcttggtacaatgccatcgttttatcatctagtactattgaacgtacatcatcttgcccatgtacatcttgatgtttcgatacatttgttgcaccttgtggatatattttaaaggttgtgtcgtatgtttccttactatctttagcttcagattcctgtgattcaaccgttttatatttttcaagtgcatgtccttcaatatcaactcgtggaataatgcgattcaaccatgctggtaaataccacgaaccttttccaaacaatttcgttaatgcaggaattaacatcattctgactacgaaggcatcaaagagtacaccaaacgctaatgccatacccattgatttaatcatgacatcttcttggaatacaaacgcaaagaagacactaaacatgattaatgcagcggctacaataacaggaccgctttctttcaaccctactttgatagaataatcattatcccctgttttactatattcttcatgaattcgcgacataaggaagacttcataatccatcgctaatccaaataagatacctatagtaataaccggtaaaaatgctagcattggtcctgtcgtttcaataccaaacagacctttcataaaaccatcttgcattactaatgttgtaaatcctagcgttgccattaatgacaagacaaatcctaaaactgcttttaacggtattagaattgaacggaagacaatcattaataagaaaaatgccaatacaacaattactgttgcaaataaaggtatcgcctcatttaactttttagacatatcaatattaatgacactttgtcccgaaatctccgttttgaacccatatttatcttgtgcatctttatgataatctcgtaaatcatgcactaaatcatttgtactctctgcattaggccctttcttaggtatcacgaccatcaaagcgtaatcattatctttactcatttgtggcggcgtaacgatatctacatttttcttatctttaatatctttatatacagactgtaaatcttgttgtaatccttgtggatcatcctttttatctttcacatttatcaacatcggaatttggccattaaatccttcaccaaatttatccgagattatatcgtaagcttttttctgtgtagaatctgctggtttaacaccgtcatctggaataccaagtcgcatatgactaactggtattgcagctgctactaatatgattaaacctagtaatactgccgcaagtgcatttcctgtaataaatttagaccaaggcgtatcaatatcttttttaaaattagactgcaatttgttcactttaatgcgtttatggaaaatactaattaacgcaggtaataaagtcagtgcactgaatacagcaaatataacactaattgccgaagcaaaccccatcactgctaagaaatctatgccaactagcgataaaccgcatacggcaatcacaactgtcacaccagcgaagatgactgcgctacctgctgttcctattgcaagaccaatgcctttaatgtaatctgtttcagttttcataacttgtcgatatctgaataaaataaataatgcataatcgataccaactgctagtccaatcattacggctaatgtcagtgtgacatttggtatatcaaatgcataagttaacaaactgataatgccaaccccagatgctagaccaatcaatgcacttataattggtaatcctgcagcaatgactgaaccaaatgtaatcaataacactacaaatgcaacaatgataccaactagttcagaattaccgcctacttctgtagatgtcattcctgtaccagttaactctgtttgtacattatgattgtcacgtaagtctttcaaatgacttttaacattatctctagagccatcttttaaagatgtttgactaacgtcatatgtgatatctgcaaatgcagttgttttatctttactaatttgcttattttcataaggatctgatattttatcaatgtgcttgtcatcttttttaatatcatctaacgttttcttaatatctttagtaatgttcggttgcacaataccatcatctttagtcgtcttaaagacaacacgtatttgtgccttttcactatcttgattaaaatgtttttcaatctttttattcgtatctaacgactctaatcctgtcattttaatatcattgtcaaatttcggtgcatttgtagcaagtggtatcaatattgcagctacaatcactatccatgcaatgaccgcggaccatttatgttttgcgatgaatgtccccatcttatataaaaattttgccaaagtatattgcctccttttaaaatcaacgttatagtttaaatatacagtgtagattattgttcgattatagtatctatccccgacctcttaaagaatcaattggaaaattttgtatattaaactacacacaaaggagaaatgtagatgaaagagactgatttacgagttataaagacaaaaaaagcattgtcgagtagcttgctacaattgttagaacagcaattattccaaacgattactgtcaatcaaatttgcgacaacgcactcgtacaccgcacaacattttataaacatttttatgataaatatgatcttctagagtatttgttcaatcaattgactaaagactactttgctagagatatcagtgaccgtcttaatcatccattccaaacgatgagtgatacgattaataataaagaggatttgagagaaatcgcagaattccaagaagaagacgctgaatttaataaagtattaaaaaatgtctgcattaaaattatgcataacgatatcaaaaataatagagaccgtatcgatattgacagcgacatcccagataatctcatattttatatttatgactcgttgattgaaggttttatacattggataaaagatgaaaaaattgattggcctggcgaagatattgataacattttccatagattaatcaatattaagattaaatagtagatgagaaactcatgagcgttaccaacattcataataaaaacgatagtgtacacgttaatgaattcgtgtactactatcgttttttatttttatcgtgcttatcgctattaaaataactgatacacaacacataaactatgaagaaaaaaataaatccgctatctaaatgactttgactcagttgtttaaatgaccaaattgctaatacaattgccatgattattaaaataacatatctcacattcttatgcctataatccttttctaaaaatatggttgctattacttaatttttaaagttataaataaaaagagccaaccgcaatggatggcccttgttcattatgaagcattagaacatttctgaaacaaccttttgttctaagaagtgtaataagtagtctgggctacctgttttagcgtccgtacctgacattttgaaaccaccaaatggatggtatccaacaactgctgaagtacaacctctgttaaggtataaattacctacatcaaattcgtttaccgctttaatccaatgctcgcgattatttgtaatcactgcaccagttaaaccgtaatctgtatcatttgcaacctcaatggcttcatcaaaatcgttaactttcacaaagccaacaactggaccaaaaatttcttcttgcatgattctatctttagatttaagtcctgaaatgattgttggttctacaaagtaaccttttgaatcatcagtgccgccaccttgttctaatttaccttcttctttaccaatctcaatataatttttaatcttatcaaattgttttttattaataactgggcccatatacgtattgtctacagtattgcccaacgttaattcttttgttaatttgattgatttctctaatacttcgtcataaacgtctttatgcacaattgcacgtgaacatgcagaacatttttgaccagagaaaccaaacgctgacgttacaatagcttctgccgccatatctgtatcaatattttcatcaactacaatggcatctttaccacccatttcagcgataacacgtttcaagaagttttgaccttcttgaactacggcactacgttcataaattctagtacctgtcgcacgtgatcctgtaaatgtaacgaaatgcgtatctttatgatcaactaagtaatcaccaatttctttcggatcaccaggaacaaagttaactacgccttttggtaatcctgcttcttctaaaatttccattaatttataagcgatataaggtgtatcctcagcaggtttcaataacactgtattacctgccacaactggtgctaaagttgtaccagccataatcgcaaacgggaagttccacggcggaattgtaacacctgtaccaattgatttatagaaatatttattgtgttcaccttcacgatcaagtactggcttgccttgagccaagtccatcattgaacgtgcatagtattcaataaaatcaataccttcagctgcatcaccaactgcttcatcccatggcttacctgcttcataaaccataattgctgcaatttccgcttttcgacgacgaataattgccgaaacacgtaacataagctctgcacgatcatttgctgaccatgttttccaagatttataagcttcgtttgctgctttaaacgcatcttcaacatcttgttttgttgcctttgatgcatttgcaatcacttgtgatgtgtctgcaggattgattgatttaattttgtcatctttgaaaatcttctctccattaatcactaatggtatgtcttgacctaattctttttccacgtctttcaatgctttcttaaacatatccacattttcttggactgaaaaatcgtaaccaggttcatttttaaattctactaccatgtacacttaccccctataaattttgaaagtggtttaaccctttgatttaatgatataacatcatttaaactcattttactatgattaaggttagttttgcaatcgctttcatttttatactttatcacttattctcaagcattttgaaattgattggttactttttaaaatttatatgtgtcgcaactgctactttatcgtttcgtcatttaatgtttcggatggtaggtcattatcaattttacgaacgactttacaagggtttccaaccgctaagctgtgtggcggaatatctttagtgacaacactaccagcaccaatcacactaccttctccaatcgtcacccctggtagcacggctacatgaccgccaaaccaagtattactgccaatatgaatgggtccggctttttcaaaaccttcatttctatgatgaaaattaagtggatgtgtcgctgtgtagaatccacaattaggtcctataaaaacattatcgccaattgtaatctgtccaccatccataaaataacaattggtgtttacatagacattttttcctagtttaacgttccaaccataatctgtatcaaaaggaatcgaaatacttacattgtctgttgttgtttgaaataattgatcaattaattcctttcttttatttgtagcactcggtcttgtatgatttaattcaaagcaaatatctttcgctcgtgcacgttcattgattaagtcttgatcaaagtttgcatcgtaccatttttctgctaacattttttctttttcagtcattacacctttcaactcctaataacttatttacttgtttaaaagttaatcaaataaacattcgcctatgcaactaatacgctataacattatgaaatcatgaccttatcacccttatctatacaattctcgcatcaaatactgctaaagtagtagataaattcaatactacagacgcattcattttttaatctattaacgtacaatgtgagtaagagaaatataaaggagtatgatagcgatgagaatattaattacaggcacagttgctatcttaatcattttaggtttggtcaaaacgatacaagattacgaaatgacaaacgacacgagtcgtcagttgtcagacaacaaagatgatgataaagtcatccatcttaataattttaaaaatttacatgcgaaagaatttaacccatctgatttcttttaagtcacctaagaattgcaaatccagaagtcatttaagttttacctttcattcatacatcctttaatattaattacgacttcttttatatagatgctaaatagagagattgttgtgcaatgtttgcacggcaatctctctttttctttttaaaattggtaaaagtaaaacgcaacgattgacttatatacctatagggggtacattagacgtgtaacaatgaatcacagggaggcaataatgtggctaatacgaaaaaaacaacattagatatcactggtatgacttgtgccgcatgttcaaatcgtatcgaaaagaaactgaataaacttgatgacgttaatgcccaagtgaatttaactacagagaaagcaactgttgagtataaccctaatcaacatgatgtccaagaatttattaatacgattcaacatttaggttacggtgtcactgtagaaactgtcgaattagacattacaggtatgacttgtgctgcatgctcaagccgtattgaaaaagtgttaaataaaatggacggagttcaaaatgcaacggtcaatttaacaacagagcaagctaaagttgactattatcctgaagaaacagatgctgataaacttgtcactcgcattcaaaaattaggttatgacgcgtctattaaagataacaataaagatcaaacgtcacgcaaagctgaagcgctacaacataaattgattaagcttatcatatcagcagtattatctttaccactattaatgttaatgtttgtgcatcttttcaatatgcatataccagcactatttacgaatccatggttccaatttattttagctacacctgtacaatttattattggatggcaattttatgtaggtgcttataaaaacttaagaaatggtggcgccaatatggatgtacttgttgctgttggtacaagtgcagcatatttttacagtatttatgaaatggttcgttggctaaatggctcaacaacgcaaccgcatttatactttgaaacaagcgccgtactacttaccttaatcttattcggtaagtatttagaagctagagcgaagtctcaaacaaccaatgcgcttggcgaattattaagtttacaagctaaagaagcacgcattttaaaagatggtaatgaagtgatgattcctctaaatgaagtacatgttggagatacacttatcgttaagccaggtgaaaagatacctgttgatggcaaaattattaaaggtatgactgccatcgacgaatctatgttaacaggtgaatctatccctgttgagaagaatgttgatgatactgtaattggttcaacgatgaacaaaaacggtactattactatgacagcaacaaaagttggcggggacactgcgttggcaaatattattaaagttgtcgaagaagctcaaagttctaaagcgccgattcaacgattggcagatattatttctggttatttcgttcctatcgttgttggtatcgcactattaacatttatcgtgtggattactttagttacaccaggtacatttgaacctgcacttgttgcgagtatttccgttctcgtcattgcttgtccatgcgcattgggacttgctacaccaacttctattatggtaggtactggtcgcgctgctgaaaatggtattttatttaaaggtggcgagtttgttgaacgcacacatcaaattgataccatcgttttagataagacgggtaccattacaaatggtcgtccagtcgtgacagattatcatggtgacgatcaaacgctacaactgcttgctactgctgaaaaagattctgaacacccattggcagaagccattgtcaattatgcaaaagaaaagcaattaacattaactgagacaacaacatttaaagcagtacctggccatggtattgaagcaacgattgatcatcaccatatattggttggtaaccataaattaatggctgacaatgatattagcttgcctaagcatatttctgatgatttaacacattatgaacgagatggtaaaactgctatgctcattgctgttaattattcattaactggtatcatcgcagtggcagatactgtcaaagatcatgccaaagatgcaataaaacaattgcatgatatgggcattgaagttgccatgttaactggcgataataaaaacactgctcaagccattgcaaaacaagtaggcatagatactgttattgcagatattttaccagaagaaaaagctgcacaaattgcgaaactacagcaacaaggtaagaaggttgcgatggttggtgacggtgtaaatgatgcacctgcattagttaaagctgatatcggtatcgccattggtacaggtacagaagttgccattgaagcagctgatattactattcttggtggcgacttgatgcttattcctaaagccatttatgcaagtaaagcaaccattcgtaatattcgtcaaaatctattttgggcattcggctataatattgccggtatccctatagctgcattgggcttacttgcgccatgggttgctggtgctgcaatggcactaagttcagtaagtgttgtcacaaacgcacttagattgaaaaaaatgcgattagaaccacgccgtaaagatgcctagattccttaataatgaaggattcattggtgattctgagataggctagtgattggctctataatgtcgcggtttacagttggatcttcgctccaactgcatatatagttacacttttcgcttagcgaattagtgtatcttacctaatagcttcgcctattaggttccatcattattataaataataagtacactacggtttacagttggatcttcgctccaactgcataagagccactaattattataaataataagtggctctaaaaggaggtgaatgctatgtcacaagaaattttaaatgttgaaggtatgagctgtggtcactgcaaaagtgctgttgaatctgcattaaataatattgacggtgtcacttcagctgacgttaaccttgaaaatggtcaagtaagtgttcaatatgatgacagtaaagttgctgtatctcaaatgaaagacgcaattgaagatcaaggttacgatgtcgtttaattaggcaatattcaacgtcatcaacaccaaattaaaaaatcgaactgatgagaatcccaacaatccaaattatctcatcagttcgatttttaatttactcgtaacctagtatctccagtctgcaatacatctaatgttgcatctaatgcatcgacaattagatttttaactgcagcttcagtataaaacgcaatatgtggtgttaatatgacatcttccctgtcaatcaacgattctaacaatggatcgttcagtgttttgcccctttgatcacttgggaaaagtttgcgttcaaattcatacgtatcaagtgctgcacctttaatcacaccattgtctaatgcgtctaataacgccttagtatctactaaagaacctctcgcacaattgacaaatactgcgccctttttaaaatgtttaaataattcagcattaaatagataatgattatatttcgttgcaggtacatgtaatgtcacgatatcagcaccttcaaccgcttcctcaatcgtatctttgtaatcgacatacgttgcaattttagcattaggaaacgggtcgtatgcgaccacatcactttgataaccattggcaaatatatcggctactacacggccaattcgacctgtaccaataacagctacttttaaatctttaatggatttcgataaaatagtaggttcccatctaaaatcatgctcccgcactttcgtttgaatttgattaaaatgacgaaccacattaatagcctggttcacagcaaactccgcaattgaattcggagagtatgacggcacatttgacacaatcaagttatacttgtttgctaactccaaatcatatgtatcaaatccagcactacgttgtgcgatttgtttaataccaagttcatttaatcgtttataaacatgctctgataatggtatttgttgtgatagcgataagccatcataaccagcgacaccttcaacattgtcatcagttaatgcttctttagtaatatctacctcaacatgatgtttctctgcccacgccttgatataaggcatatcttcatcacgtacactcatgattttaatttttgtcattttaacatcacccttaactttattattcatataaatatgctagttctgttaatcttattgcagcttcgtctaatttctggtcatctaacgccaatgaaattctcacataacgattaccattctctccaaatggtttccctggagcaacaagtattgacttctcttgcactaaaaattgctcaaattgctcgctgtcataaccaggcggtgtttccaaccatacatatatgccacctttagcatgaacaaatggcaaatcagcttttgcaagcatggcttcgaatcggtcacgacgtgttttaaatacattgctttgttcttctaaaaaatcatcataatgattcaaagcatatattgcggcatcttgtaatgcaccaaacatcccagcatttgtgtgcgtttggtactttttcaaagcttgaatcatatctttattaccaactgcaaaaccgactctaaaacctgacatgttataacctttagacaaggaataaatttcaatcgcaacatctttcccattttccgaagcaagtatactaggatttttagcgtcgaaaccgaaagcaccataagcaaaatcatgcacgattttagtgtctgtatctttaaatttagctatcgcttcatcaaaaacttctttcgtagctgtcgatccagttggattatttggatacgttaaataaatgagttttgttttatctattatttgtgaatcaactttggaccaatctggcaaataatgtggcggttctaaattaagcgggacaggcttgccatcagctaaaagtacacctgctaaataatccgtgtatcctggatcaggtagtaatacatagtctcctggattgataacacatgttggtactgccactaatccattttttgtaccatataaaatgcatacttcatcttctttatctagcgtcacattatattgtctttgataaaaatctacaatagcttgcttgaacgcttctttaccatgaaaagcaccatatttttgattttcaggaatagttagtgctttttgaaaatgatcaataataccttgtggcgtgggcccatcagggatcccaactgccatattaattaatggcaatggtccatgttcgattttacgtcccatcgttttcccgaaataactatcagggatatttgctaatttgttagagatcatcaaattcctcctctatcattaaacgtagcctgggtgactatcataaacctaacaacttgtatcactctcatttagatggttacaatgacattgccattcaccgttatgttcaacagaacttatgacacacgttgtattcaatgaatttattttcattttaggtaggtacaatattattgtcaatattaagaattttcagattaatatacactcaatcgttaggatttaactgccatgcatatccgcatgcacaaccagttagatatgcttatataaagtataacgcccatcaaggtacgtattcaaacgtgaaccttaacaggcgcctattcattgttaaataaaacttctttagaacatacttatttcactatgccttttacgttccccttatacttttctcacatctttctcttagactactcccttacacaccctgctcaatatctttaatcatttcatctacagttattttcgcactcgttaagacaataggaacgcctgcacctggatgcgtacttgcacctgcaaaatataaatctttataatctcgcgatacattttgtggacgataataattactttgcgctaaagttggcattaaaccgaatgccgaaccaaatttcgcatgatacgtttgctcaaaatcatttggcgtaaagattgtttctgaaacaatatgcgattttatatcttcaaatacttcaatcgttgctaatttacgataaataatttcctttatttgttgcgtcaaagcttcatctgaccaatcgattccgctacctgttttaagttccggcgtcggcattagcacataaataccagttttgccttctggcgcaagtgatttatcagcgaccgctggtacatacacataaatagaaggatcatatgataaacgtccctcaaatatttcttcaatattgcctctaaagtcatctgaaaaaataacattatgaagtctcacttgatctgtcacatcaatatctataccgatatacattaaaaatgctgaacaagagtaatctaagtctgcaattttatgtggtggatactttttaataggtgcaaaatctggcattaatgattccgcaacactagggaaatcagccgtacataaaattttatcaaattttcttatgtcaccattcacttttatcgcatcggcccgtttgaatttaggatcaataataatttgctcaatttcagcatttagttcaatattaacgcctaagtctttatttaattgcgctagcccttgagccatgccatacataccgcctttaataaaatgcacaccaaacatcatttcaatcataggaataattgaatatagtgacgggcctcgttttggatcaattcctatgtataacgtttgaaacgctaaaagcttttgtatcttttcgttatcaatataatgttcaattagctgatctgcatgatttaacgtttttaacttagcaccttgcacaagtgacgtcatattataaaagtcactcggtttgcgatacgttctttctaagaaatagcgacgtgcaatttcatattttttataaacatccgttaaaaaggacataaaaccatgcgttgaaccaggttctatactttctagcatttgctgtaattcagctaaatctgtaggcaccgttatacgatcatcgcggtcaaaatacacatcgtaaatataacgtaattgtctcaattcaatataatcttcataatttttaccacacgctgtaaaaacatctttataaacatctggcatcatgacaattgtgggacccatatcaaatgtaaagccgtctttctttaattgattcatacgcccgcctacattattattttttcaaatatcgtcacttcatgaccttgagaagcaatacgggctgccgctgctaatcctgtgacacctgcaccaattactgcaatcttcattattcaaccacctatattctatgatatttactatttatttcatgaaacaactttgcctttttcctcttatccacaaaaacacgttcatgtaatgtatagttagcctgtctcacttcgtccagtatttcaatatatatacgtgctgctaattctatgattggttgtgcttcaatactaaatactttgatttgatccataacatcttgaaaatctttttctgcgatagctgcataatattcccataagtcaatataatgattattaacaccattttggtacacttcagcaatatcaacttcatattgctttaatcgttgcttactaaaatatatccgttcattgtcaaaatcttcaccgacatctcttaatatattaatcaattgcaacgattcaccaagtcttcttgcgacatcgtatgtctgatgtgtttcatgatcacttaaaatcggcgtcaatacttcacctactgtaccagcaacaccataacaatatccgaataattcagcgtccgtttcaaacattgtaaaatgttgatctttatatacagtatcaatgagattatagaaagattgaaaggcgatatttttatgttgtgaaacattctgaagcgccatcatgattctacgatcactttgaaagtgatgatgttcatatgggtatttttcaatagattgtatatcttcttttatttgatttaaaaattgaatatcgccataaacatctatactgtcatcaattttacgacacacagcataaattgcccaaaccgcttttctttgatcttctggtaacaagtcaaaagcgtaagaaaagctttttgaatgtttcttcatgattttatgacaatatttaaaattcatatccatcattgtcatactagtcctcctatattgaaatgccattaccttgatttattgttctttagatatagaatattgacgacctttccattcaactacaccataacgatgcgtttgtttccaagattggatgaaaattttagtaaaaaacataaataacaatggatgacataccattaataaattagaaaattggccgacccttcgatgcagataaataaattgtgtagtatagctcaagtaaagtgctaccatttttcttacagacatttggcgatattttaaactaagacatagccctaaaatactcgctatagaaccgaacaaccacaacacaattgctgtcatgatcttaggctttgtgccacctgccccagttgacaaatgctttgtccatccttcttgtaatgactgaaatccttcttgatacatgcgaaatgcaacaaatggaaacccttcataaactgttacgggcaatgattgtgaagtatatgcacttcctaaagcaaatccttcaataatatgacggtttgcacttttatgacctccagttgcataataatcttctttatttgttaatgtcaccggtccaaatgcatgctggttagtccgaccgtcgtctaaggtagaaaatacattcataccaacgactgtcattaaattaaatatcgctgaaaacccttcgtagaaacgctttgttatatgataaggctgtacgcttaacaatcctttttcaccttgtaattgatactgattaatcaacgtttcaacagcatctttccttaagaaagttacatcagcatctacaaaggcaatacgattcgtacatgcatgcgtcacaccttgataacaagcatgtgatttcccataccatttgccgtcagtatcatcaacaacatctactacagtcgcaccatatgaacgtgctacacgtgctgtttcatctgtcgatccgtcattcataacaatgacatctactggaacttgctgttgtattatcgaatgtagtaaatgacctattcttttttcttcgtttctagccggaataataattgttaatgctttatgattgaagttcagcgttttcgcctttagctgatgtctacgattaaatatcaatgcaccacacgccatagacatggtcactattactgttaatattcgtgataaccatttcatagatatcacttcctattcttcgcttctcgcacgtttattttgtctgcgacttgttgcccacttaatgtaaccattggcatgccaccaccaggatttactgatccacctacaaagtacaagttttcaaaatactgactttctttaggaaatttaaaccctttgtttttctttttatctgctacaacaccatatattgcaccacgattagaacgataatttttttcaatatcctccggtgtccaaacatcttcataaataatgtgttttcttaaatcagtaagtcccattttttctaatttatccaaaattttatccctaaacttcgcataatcttcagtggtaaaaggctgatcttgaatatatggaatatgtggtaagactttgatattttcataacctactggcgcttgtgtgtgatcagttttattcgtatttactagataaatggtcggatcatctggcaataccttttcatgaaaaacttgttgataattgagataagcattttccgtaaaaaagaaattatgatgtgctaattgcgggtattggcaagcaacacctaaatgcatcacatatcctgagcttgctggctcaaattcccgctctaatttgtttaatcgttgagtatcaaggtgaagtaaatatttataagtaggtatgacttccatatttgaaataatataatctgcctttacaaactcacctgtatctaatctgacacccgtcacacgtctttgatatgttttaatattgtccacacgtgcacctgtatgaattgtgacaccttcttcacgcgctagcttttccaaggcattggctaaatgatggattccaccttctacataccaaaggccttgctcttgttgcatatggaataacatagataatacagctggcgcatcgtatgatgaagaacctacatatttgataaaatagcctaacatttgtcgcaagtatggattcgagatacgcttgtctatggcctgttgcatagtatgtacataatcataattaataagagcatttaatggcccatgaaatttaataatttgagatagtgtatctaaaccatagttaaaataccctttttcagtaatacgatcgattcgtcttgtataattcaaataattttgcagttcctctatatcctgtttcgacaatatcgcattatgctgacctgtttctttaataccttcatacaaatcgatagtcgtgccatctggaaaaaagctacgccattgatgtggtaaacgcttgattgtaacgtagtctgacatttgcttcttgctatattcgaataatttttcaaaaatataaggcatcgttaaaatagatggacctaaatcaaagccaaagccatctgattcatgacgattcactttgcctcctatatgattattttgttcatataatgagaccgaatagccactttgtgccattcgaattgctgcagaaatcccacctaagccaccaccaataacgatgatatgtttagtcatgacgttcacctcttcgctttaatatgcgtagtaactgcgttaatctcggtcgattatagcgttgcacaataatgattggaacattagctatcattgcatagaaaatatttatatactttactaaacgagggcctttattgaatatgatgactggaagtatcgatatccaatgaatcaactctgccctctttgtctctataatcattttttcaatttcatcagtattgattgtcattaaatgacgctgatcatatatattttgattaagctgatgaccatctaaaatcttatgtttccattttcttacgtaaaaccatttgttccaaaattttccatgcttctcaaagttaaatgatttaaatattatgtacttctgacgaaaatacttatcaggaattcttgtacctaaatttgctatatttagttgaacaattaaccaatacatactacaaaaaaatgctgttttaatatattttttcatggttttcatctaaattgaatcactctcaatcatactgacatagtataaattatcactttattacttagttccctaaagatcagtgaataaaccgctctcatttatatttatataaaacaaaaacgccaatactctcatgttagagaatattgacgtcatttgatttacatttgattaatgaatgaaattatatgaacctgcttggtttgctgaaattgtacgagacgtaaccacaccagcaccatgtccatagttcatttctgaaacacgaacagaaccgttgctgttaacgccttcaacgtaagcaacatgaccgtaatagccttgtgttgtttgcatgatagcaccaacttttggtgtattgttcactgtatagccagatgatgcagctgcgttagcccaattacttgcgttaccccatgttgaaccaattttcccaccaacacgatcaaatacataataagtacattgtcctgaagtatataagttacttcctgatgcataaccattagaaattgaacgaccatttgaagatggcgctgcagttgtagtcacatgaacattattacttgttgtgctataacttgcacctgaagcaccagtataatagttatttgttgctgtttgactattgtttgtatagttattgtattgatatgaatgattatagtagttattgtaagatgcattgttataactataagtattgtagttgttgtagtagtatgtgttgttttgcgttaattgacttggattccaatttcctgtccaagtgtaatgataattaccttgtgcatcaattgtatacgtatagctgtatgattgagcgtcattagaattatatccattgttattttgttctgcggcttgtgcatcatgtcctgcaaatgcgatagtggcaagtcctgctgtagcgattgtagctgtaacgatttttttcataattaaatatcctcccaataatcaaaacactctatacatatagtcattagcgactcaattattttaaattttatattttttatttttttagtatgcaaacaattataacttttatagttttgcgacaaaacaaactataacagagattaggtgtcttgcgggctttgttatcataatgtaatctgttcctaataaagcttcattgaatgtaatataccaattagaatgtttacaacactttttctgcaccgttactatgggatttgaaaataaaaaagcactaaacttttaatgaaatacatcatttttgataataaatatcagaagtaatgtaatatttcaaaagtttagtgcatcaaattatttcttatttgtagcatgtgtttccatcgtttttacaatcaaatcagtcagcgctttactacctgcatattctaagtgaataccgtcatatgcaaagtattccggatgacctgcagaagctttataccaatcgactagatgtacattagagcgcttttcagctgcctcataaattaatttatttattctaccttcataatctctaggtactctaatagaaactaaataaatgtctgcttttccaaaactatccaatagttcatttaattgatctttcgtaaatgccccatttgtaccaagctctactacaactttttgaccttttttagcatagtctttatattgcgatttcacaattggtgtagcatcaacgagttgccgtccaactttaccatcaatttgtgcatttggtattttcttagtaaagacattaccaatatccaccatgaccgagtcaccaattaatagtggtgatgactttttaatatcctctttgctattagctgtctgcttatcctcttgcttatcttttttaacgacttttttcttcgttgttttaaattccgtcttcttctctttcttctcggcttcatgttgtttgccaagtgcatcaaactgtccactgagcacaacgatagacggaaccaataataggataactaacactgttctagcaaattgccccttctttttaggtaaaaatgcaaaagctttaaatccttttctacgtataggtgtttcaataaagcgatacgaaatttcagccattaacgctgttaacaaaatttctataatataaacgtataccggtatttgtccttgtacgtaataactgttcacaaaaacaatgataggataatgccataaatataagctatatgatcgtttacctataattagtaaaggtttcatacttaaaaatttagcaaataaactagaaggatgtaccgcaattgcaataatgaataaagttgcaaatgatataatgtaaaatcctccattatagatccattgatcttggtcgccaactataaagaacaaagtcattagaaccgcaaaaccagatatccctataatatctaatgatacgacaatctttttagaaatatcttttttcaaagcaaacggaggccaaataaatgctaatatacaaccaagcaataaagtttgcagtcgtgtatctgtcccaaaatacacacgtgaattatctccagtgatgaaatgaatcactatcataagtcctaaagaaatcaacgatacaataaatagcgtttgaataatatttctcggtttaaatctatgtaataagaacgtgataaccaatgggaaaagcaagtaaaattgttcttcaatggctaaagaccataaatgtttgagtggttcaatagcaaattggttaaaataatctacattctgtgagatgtaccaccagtttgaaacatagaatatagctgcaatagcatctcgtttcatttgtataatcaattccggtttaaatatcagtgtgaacgtaagcacgacacagattaaaaataacactgccggaatgagtcgtttcaatcgtcgcttccaaaactctagcaaatcgattttttgcgtccgataatactcacttatcaacaaacttgttattaaataacctgaaataacgaagaatgtatctactcctaaaaagcccccacttaaccattgtgcattcaagtgataaataatgattcctataactgcgaatgccctcaatccatctaatccaggtaagtatcgcggggaatacattttttctaaacgtttaaagtcttttgtatccatgttaataaacgccccatttatttttctctattttgtagcatatcacaatatttttgaaaataaaatattgcactgattttcattaattgatttaacccttaattaagatagttttaaattttttattaagtagaaaacaattattacagttaatttcattactgcaaaccacatataaatttgtcgattttactacataacatagattatcatagattcttgaatttttagcaaaataactgttattttcattatatttttacaaaaaaaggttcgttttatattttatgcatcttactgtaacagaatcattaagatatgctattcgaatatactttttcaaaatttatataatgaataaattaacatgtattgaaaaaaaagcgaaatgcagcctatcctctaatgtaaaccaaacgatatatctcgtcagactttatatttaaacgctatgtgtcacttttaaaatgaatattactaagattgtcatatcaattattattgcatcgaattaatcttttaaatttctgtaataaaacctattatctacatctaatttaggaaaactacttggtaaatctcctcgcttaatttcacggaagccattattagaataaaaatactgtgcactaataaatttatcaattgttcctaaataaataccatcgatattttgttctttacatgtcattataactttatctaaaagttttttacctatttttaaattcctataacctttatcaacaaacatttttttaagtgcagacatattattatctagtctaatcaaacctatagtaccaacaatattttgatgattgtttattgcaagccaaaattgccctccattattcaaatagttatgttcgatgttctccaaatcaggttgatcatctctatcaatttttatattaaattcatttttttgaatcgataaaataaactcgattagctcttccttataagacctattatattcaattatgtttatagccatttttatctcctttttcatttaatttaattataaaatgtgcgtttagtttgtatctagtgtactcagtacagcctcaaatgaagtttcattccacttggcacttaataaagacaagtcaggctgggacataaatcaatgttctatgctctacgaagttatattggcagtagttgactgaacgaaaatgcgcttgtaacaagcttttttcaattctagtcaaccttgccggggtgggacaacgaaataaattttgcgaaaatatcatttctgtcccactccctccctaacttcaaaatccactttttaaaaaatgtatttttaattaataaaaaaactctccccaatttctatgggaagagctatatatttaatgtctaaacattacttttatttattatgaaggaattagaatccccaagcacctaaaccttgtgctttgtatgctttaacagctgcgttgatttgttggtcaacagtgtttgttggaccccaacctggcatagtttggaataaacctgaagcacctgatgggttgtaagcatttacttgaccatttgattcacgagcgatgattgcagcccatgtagaagctgaaacaccagtacgttgagccatgatttgagctgctgatgaaccagtagcacctgcagtattaccattgcttaatctcactgaacttgaagtagttgaagtgctgtagttatggtaagttggagctgaaacagcttcaacgtttgagttacttgattgtgcattgtagcttactgattgtacatttgaaccttggttgtatgaagtagtgtagtctgcacctgcaacgtttgagaaaccagcagtttgaccattagctgcttcatagctccatgaccatgtagtaccatttgaagtgaagttatattggaaaccatcttttacaaagtggatgtcatatgcaccatctttgattggagctgcatttaattgatcttggtgattatgcgctaagtcaactaagtgtgcttgatcaacgtttacttcagcagcgtgtgcttgatgtcctgtacctgctgcgtaacctgttacacctaatgccactgctaatgatgatgccataattgtctttttcatagtaaaaaatcctccagtaataattgtaagtttatgtttttagtaattatattttgaatttgaatgtcgtagtgcaagtttaaattgtcttttatttctttcaacggtactcactatatcacaaaaaaccagccagtaaattacactttctttacaaaacattacaatatcaagtgttatttgtaatgttgaaatatggctgttttatactgtaatgtgaaatatgtgccctttagaatccaatcaacccttgaaatagtctttaacacataagatttttactatatttagctcaactattacagctttcgtaatattacagattgtatttttgttacatagctgtaatatatctgacatgtaacttctcttattttcgtacattaaacgcaattaaaaagcaatcaacacatatgtttctacacatgtattgattgctattattgttgtatattcaaagttttaaaacacacatcttttgtgaattgtcttatcttttattagcgcaaataaactgcagctcaattatattgttcaacttcattctcgcaattcacaataacattaaataatttttggtctcatattttcaaaaaacatactgttattatcccatgaatttaaaaatatcattagtatataaacgaaacactttacgataaatgatatctgcaagccaagctgttacaaatggtacaacaaagaacgctactacaattagtaagacactcaaccaagcagaatcaacctccataaatttaaatgcattaatcggtcctaccattcctataaaaccaaatccagctgattctttcgttccatgaatacctactaatgctgataccaaacctgatacaatggctgttgtcaatattggtaacataagaattggatatttcaccatattaggtatcatcattttaacgcctccaaagaagacggataacggcacccctaaacgattcactttacttgtaccaattatcaatactgcttcagtcgcggagataccaattgacgctgatccagctgctaaacctgtaatacctatcgcaaaggcaatggccacagttgatagtggcgaaataataataagactaaataccattgaaatcaaaatactcatgacaatcggttgtaattctgtaaaaccattaaccatattaccgatggctgttgtaatcattttcgtatacggcaatattaaaacaccaattgcacctgaaataccgccaacaactgttgggaatacaatcaatgccatactacctacacgatgttgaataagtaaaatgaacaacactgcaatcgctgctgtaatcattgtattaattaaatcaccaatacccgtaatcatccaagcaccatttttaaactgcgctgcaccgcttcctacatatgctgcacttgccacaacagcaattgctaatggcgataggtcaaatttcatggcaaccaatgcaccaatcaaagcaggtactgtaaattgaattgcaacgacaacgcctaataacgttttaaaaatcggatgataatccataaagtatttaaaaatttctccaagtatcacattaggaactaaacccgcaacaatacctatggcgacacctgataaaactctaaatataaaatctttgggtgtaattgttttaattgatgtcataatatcatccttccatttatgtatatacatctgtatgcaaataataaagagccttaagttataagctgccactagcttaaattctaagatgtgcatgccgatgttgttatatttaggctagcagtatcatctataactcaagactatgaaaaatagtatatcacaaaattctgaatttttagataaagaaattggcaatttttcaaacatattgttacaatacacttttattttatcttcatttttaaaatccattaatacaatagaagaaagacattcaaatgcttaccaaaaaggtacattatttgttaggagcgtatcagcacttacatatcatcaacacaattgacaatataatagaagatactgataataagtgttaaaacaacagatgttaggtagtgaacaaatgatggaaagtaaatccatagatccaagaatcgttagaaccaaacaattgcttgtcgatgcttttcttaaaatttctagagaaaagaaattatctcaaattacagttaaagatatcactgatattgctacgctaaatcgtgcaacattttacgctcatttcactgataaagaagacctcctagactacacattatctgtaaccattttaaaagacttgaatgataatttgagcatttctaatgtcattaatgaaaaggttctgcgtaatattttcatttcaattgcgagttatatcaaagatgctgcaaagtcttgcgaattaaatagtgaagcattttgcaacaaagcacatcgacgtattaataatgaattagaagatatttttgcgattatgttagaaaacagctatccggagcatcaacgagatatcattgtaaatagtgcgagttttttagcagctggtatctcaggcttagcattacattggtttaacacgagtcaagagacagccgatgtgtttatcgatcgcaaccttccatttttaattcatcatatagcacatttttaataaaacttggtatttagtcatgcatcttgaaatcactatgtgacttaggttcatacttgtacacacaataaaatttaacgtattacgattgattagccgtgtctaggacataaatcaacgtcctatactctacaatgtcatattagcagtcgttaactgaatgaaaataagcttgtcattaaaacatatagattttagtgacaagcatttttgtttttgcgtacttaaacaacacttcaggcaatatgttgtttaggcaacaaatgatatgtgcgtgtttattggcaaacgtacgacatagtagtatagtatgtctaaacaacatatgttgcatagttgatatgcgttgtttaaatactaagataggagggattgacgtgagcgagacagatgaacctcaggggtttgaacgcacgcataatatattaaatattaatcagagtagtctgggtgtagtgacatacattacaaataaattaaagtcgacgttgaagcaacacataataattgctcgtggtaaaaagcgaatcgactatcgactgtcgtataacttttacactacgtattatgataatgtagaaatcaagaaaatcgactgtgaatatacctatgctatgcccattgcaattttaataagacacacgatgtcattcgacaatgctcatttctttgctcagttacgtcatcctgtcttataaaacaacattgcagacatgtatatcaaacgacacttcaataacatcactttgccatcgtactactagtaaaatcgtgtctcaaaccccttattttaattccaaaaatctgctggtcaaaagaccgagaaactaaaaacattactggatgtgttgataaattatcttatagaaacaaactcaaaatatatcaacacttgattctaaggaggatatgacaatatgaaaattttagatagaattaatgaacttgcaaataaagaaaaagtccaaccacttactgtagctgaaaaacaagaacaacatgcattgcgtcaagactacttaagcatgatccgaggacaagtattaacaacattttccacaataaaagtggttgatccaatcggtcaggatgtcacaccagacaaagtttatgatcttcgccaacaatacggttatattcaaaattaatatttgctcacgaggtattgcacttaaggtgccaactgacctcataaacaaagcccatactgattgaagacactaatgtgtccaggctgggacataaatcaatgttctatgctctacgaagttatattggcagtagttgactgaacgaaaatgcgcttgtaacaagcttttttcaattctagtcaggggccccaacacagagaatttcgaaaagaaattctacaggcaatgcaagttggggtgggacgacgaaataaattttgcgaaaatatcatttctgtcccactcccacattaaacttcatctctgtatgggctttttatttattcttttgagaatttcattttagcagactaaaaaattaaaatggtgtccatcaagatctttgaacattgcaccataaaacccttggcttactgttggttcttgaacgactgtgccacccgcttctttcactttattcaccaactggtcaacttcttcatttgtgttcacacctagagaaatcatcacttcatttggttcagtattaaggctttgctgacttactttttggaaatgcttgttttctattaaaattacggttgtttgacctatttgaatgccgaccattttatctaacatttgtgggtttctatttattttaaatcctaacgctttataaaactgtgcgctcttttctaaatcttgtacatgcaaattaaaccacattgattgaatcatgattgcaccccattcattacttattatagttttggactttaagccaatcacttaatgataatcttgttggatttatttcagccattaattcaaagtctacttcataacctttttcttccaaccattgcttttctgcaacaccactaacaaattctccttctataacagtagatttacctgtcacttcactaaaaattgttgctgcttcacttaatgtaacttcatcggaaccaatctctattgattgatgcgtaaagctttgtggatgtgcaaaaatatacgatgcaattttagctatatcaatagaagaaatcattgtgaattttatattcggattaataaattctggtaatgtaatacgttcatcttcgactttagcaatgcgtaaaaaattatccataaagaatgatggtttgataactgttgcatttatattagattccattaatctattttctatttttgctagtacttcaaagtgtgggccagttcgatttcgattaacccctcccgcagtactatacacaatatgttgaatattttcttgctcagctatttcaattatcttcataccttgtcttaattcttcgctaacatcatctttaacgattggctgaatactgtataagccatacttacctttcatcgctgattgcaaactaacattatcactcagatcaccttcaacgattgataaatgcggatgtcctatgtctgaaagtttacgattattcttatttctagttaatgcacttacataccatccatcctctaacaactgttttacaactgcattaccttgcttccctgttgcgcctattactaaaatatctttcattttagatccactcctctttttatcttaaaaaccaatagtcctctttttcaccttttaaatacgtatatggttctggtgtttgtccatttcctttaatattgtcgtttattacatctctgacatcccatactaaatgaataaatcgttgtaattgatgactaaaaatgcctagtggcgctgtcatagctaatactttttccacatcttctgtagtgacattcagtttttcagcaatcatttgaaccgataaagttgatgcttcgaaatgtgcttgcaactcttcgcacgtaatgcgtctttgctctttatttaaagacatatgcaacactcttttcttttttaaatatttacagcactttgcaaattcattgctaactttcttaacacgttttataataaacggagagttatccgtttgtcaattttagagaactataagtaggtggaacaatgcgaaaggacgccatagagaataggcaacgaattgaagaaatagcgcacaaactttttgatgaagaaggcgttgaaaacattagtatgaatcgtattgctaaagaactaggtatcggtatggggacattgtatcgacatttcaaagataaaagcgatttatgctactacgtcatacaaagagaccttgatatttttatcactcattttaagcaaattaaagatgactatcattctaattatgaggttatgcaagtgtcgttagattatcttttacaatttaaaatcgataataaggcactactgcaatgtattgaagcaggcaacaataaattacgtttttaccaaagcgcattttatcaagaattatttgatttttattatgacttatttaaaagcgatgacgacatttacaagaagttcaaaacagatatgctgttgcaatcattatcaactagtgtatttgccttccaaatagagcatcgccatatttcaattgaagcgtacagaaattatttattaaacatttatttagatgaggtggaacgtaatgactaaaattgtgttaatcacaggaggcaataaagggttaggctatgcaagtgcagaggcacttaaagcattgggttacaaagtttatataggttctcggaatgatgtaagaggacaacaagcatcacaaaaattaggtgttcattatgtacagttagatgttacaagtgactactcagtcaaaaatgcttataacatgattgctgaaaaagaaggccgtcttgatatcctcattaacaatgcaggtatatctggtcaattttcagcaccttccaaattgacacctcgtgacgttgaagaagtatatcaaacgaatgtattcggtatcgtacgaatgatgaatacattcgtccctctcttagaaaaatctgaacaacctgttgtcgtcaacgtatcaagtggtttaggttcatttggaatggttacaaaccccgaaacagctgaatctaaagtgaattcattagcttattgttcgtctaaatcggcagtaacaatgctaacgctacaatacgctaaaggattacctaacatgcaaatcaatgctgctgatccaggcgctacaaatactgatttagttggtgattttagtaataattccaaacacgtttctgaaggaatcaagccaatcattcaattagcaacgattggtgcagatggcccaacaggtacatttattaatggcgatggagagatgccttggtagatcaattttatgttacaaacattgaaattagaggtatacaaaaaatgcttctgcaatagatgcaataaacatgcaatacaatatggaggcgaattaaatgaaaagtattacgtttgaagaacattatgtcattgaagatattcaaaaagaaacgatgaatgcgatatcagcagatcctaaaggtgtaccgatgaaagtaatgttagaaggccttgaaaaaaagacaggttttacaaatgccgacgaattatcacatcatgatgaacgtatccaatttatgaataatcaagacgttcaaattcaagtcttatcttatggaaatggttctccttcaaatttggttggtcagaaagccattgaattatgtcaaaaagcaaatgatcaattggcaaactatattgcacaatatcccaatcgctttgtaggctttgcaactttacctatcaatgagcctgaagccgcagcgcgagaattcgaacgttgcatcaatgatttaggattcaaaggtgcgctcattatgggacgtgcacaagatggttttcttgatcaagacaaatatgacattattttcaaaacagctgaaaatttagacgtaccgatttatctacatcccgcgccagttaacagtgacatttatcaatcatactataaaggaaattatcctgaagtaactgcggcaacatttgcttgttttggttatggttggcacattgatgtcggaattcatgcaatacatctagtattatctggtatttttgatcgttatccaaagttaaatatgattattggacattggggtgagtttatcccattcttcttagaacgtatggatgaagctttattcgctgaacatttgaaccaccctgtaagctattactttaaaaataatttttatatcacaccgagtggcatgttaacgaagccacagtttgatttagtcaagaaagaagtaggtattgatagaattctttatgctgctgattatccatatattgagcctgaaaaattaggtgtatttttagatgaactgggtttaacagatgaagaaaaagagaaaataagttatacaaatggtgctaaattattaggtttatcacctaacaattaacaaatggaggtcattgaatatggaaactttagaattacaaggcgctaaattacgataccaccaagtcggacaaggacccgtgctcatctttattcctggtgcaaacggtaccggagacatttttctgcctcttgcagaacagttaaaagaccattttactgttgtagccgttgatcgtcgtgattatggagaaagcgagttaactgaaccactccctgattccgcttcaaaccctgacagtgattatcgtgtcaaacgcgacgcacaggacattgccgaacttgcaaagtcattaagtgataaacctgtctatatattaggttcaagttcaggttcaatcgttgcgatgcatgtgttaaaagattaccctgaagtcgttaaaaagattgcatttcatgaaccaccaattaatacatttttaccagacagtacttattggaaagataaaaatgatgacattgtgcatcaaattttaacagaaggcttagaaaaaggcatgaaaacatttggtgaaacattaaatatcgcaccaattgatgcaaaaatgatgtctcaacctgctgatactgaagaaggacgtatagaacagtacaaacgtacgatgttctggtcagaatttgaaattagacaatatacgcattcagatattactttggatgatttcacaaaatacagcgataaaatcaccctactaaatgggacagattctagaggctccttcccacaagatgttaacttttatataaataaagaaactggcatacctattgtagatattccaggcggtcacttaggttatattcaaaaacctgaaggctttgctgacgtattattaaatatgtggggttaatctatcgttctctaataaaacagcttggacagttttcaaattatatttgatggctgaccaagcttatttttgtttacgtttaaacgttcaaatcaactcgttattatacatgaaggcatgttaaccattctcttccactgaaaacactactgttccaaacattgatagtcttcttttgaaataccctttccgataagcaccaaatattctggcactttttttgaaaatgctacaggtgttaattcatattgtccttgtgtaaattgaatgagatacgtatgtgcggtgtcttcaaatgtcataaaccctttcaacctataaatatgagacggaaggcatgctaaacgttttataaactctgctttagtacatttgactggtgattgcacaaattgatgattaatcatttgatgtaaagacttatgtttattgtcagaagttgctgtcatttgtctaactgatattggcaaagtgacgctgccatgcataccgacttgtatatcggcctctgggttaataacttctaaatctttcaatagtttgctcgttgtttcaacatctgctgaatctattttattaacaaataagacagaacaatatgctaattgctcataaaataagccttggatgtctttagggaatgatttaatgtgtttatacatgcttgcgtctattacaccaatcatatgtgtaattgttgtaaacggagctaaaataggcgttaaacaagcatctaagacagagaccggttctgcaatcccactacattcaataaatacaatgtctggttgctcttttaaatataattgatgtaactgttctgatacatctgctttcattgcacaacagatacacccctctgtcagttcacttaaaggtatgtcttcagatactaaggcaccatcaacactcattttcccaaattcattcatgatgactgctggtttcagcgattcctttaatgattcagcgagcaaatgatttaagacagtcgttttaccgccacctaaaaacccacctataataactattttcatctgcgactctcctcttatacttcatatgaatagcatattccaagatagatctcctattgactgacatgactctatattcagttatagttcattttttttaaataatcagcattactattttaacaatgatgcctacaccaataactaaagacaatgatgtcaccatttgctttccaattaattttagtgctgactgaccacctaaatgtttcaaaagcatcgtcattgtgaccgagcacgctgtaaaagttgaactaaaaaacacaagtagtagtaactgtgttgctgtcattccttgtaataaggcgccctgatgcaaattaaacaagagcatgccgtcttttcgaatcattgaaaataaaatccctggtgacaattctgacgagatgcctaataacgataatataggtgtaaatatttgtgataaaacattcaaaattggcgttagtgataaaatactaacaataagacagattgtgataaaaataggtagcgcttgaacgataaacatttgtatattttgccacatttgtagcaacatttgacgtatatttggcatatgtaattgcctatcataaggtagcggaacgctaagttgttgatcattctttttcaaccatatcctattatgtaagatgccacctaaaagtactaatattaagtacggcataaatagccatgactttccagctacactaaaaatagataatgtcgcacctatttgataactacaagaactaccaaagcttattaaactcatacactgtgccttcgtgcaggtatggcattggtgtgctgcttgtgaaatagctgctgcattacatccaaatccttctaatagtggcacgatatcattaccttgtaatcctatccgtaacattgaaggttcaattgcccatatcatccatgatttaagtcctgtttgatcaattatagcagttgataaactaatcaatattacgaccggcaatgcccatacgagcgaatatgttccaagtgatagcacaccataatcaccaaataatatatgttgtaatatatcgtgattgagcaatgttgtttgagttaaatattctatccatgctgatacatactgattttgaaaccaatctgaaaattgataagcgataccgattggcaatgcaaacattaaaaatatcaacaaccaggctaaaaatgtcgcacttattttaggtcttaaatgtcgtcgctcatgttgaaatagtgtcaattgttctatcacatgttcgctcgctataggcgaagaaactacactttctgccaatgaaatatctaatttctgttttatgattaataatcttaatttcgctttttctgttgcggtaagtttatccgcatgactaataaccaaataatgaggttcattaggtatgggcgtataatgccccgttctcatatcatatttcacttctaacatgtgcatgacacttcacaacatgaataatcatctaaatacatttgatttttttggtaattttcaatgacctcttgtttagctggtaagccttcccgctgtgttaaaagatgtgcaagtactgcaaatcgcgctctgaatttatagatatagcataatttggcattatcattttcaactgttgcaccaatcataaaaatattcggataacgtgtcgattcatcatgtgttgttaatttaatatcttgatttgttgtcacaaataattgttgaacgattggattttttgttgcatcaaagccagttgctagtattggttcatgaggcgtatgcacactttgtccgctatcaaaactgatatgatactgtccattgttaaaatcaatatctttaactgtataatgtacattcatttcaatgcgagcaccttgcttaatgacgttacctagtctctgacgtgtataaggtgacaatctaacactaggatcagcatccggatcatttaaaccggttgtgctagtataaagtgcgatgtcagagccattttttgcaagttgatatgcagcatcaaagccactttcattacctccgataaccacatattgtcccttattaaagttatcaaagtcttcaatttcactataatgaataccatatttaaatggctttttagggaaattataatcacctgttgcgacaaagatataatccgcgtgatatgtctctgttgtcgttgcaatcgtataaaatgcatcatctacagatatatttgtgacaactgtattttcaaagatattcagctcgtaatggttggcaaccacttgtaaatattcagcatatgtttctccggaaatatgttcttcattaaatgtaaatgctggtgaagtatccatggaaattgcattcatatcaggcatgccaaatccattagacgtaaatgatggcgtaatcgtaagggtcgatttcggccaatgtttaaatgaatgtcctactgttcctttttctaaaataatgacatctgttataccgaaatcttttaaggtaatggccatacctatacctgcagcaccggcaccgataatagccactttatgatgttgcatattaacactccctcaatgatctatttcaagttattgtttttggttataaatcgtaataattacgatttataaagtatagacctatccttgagaaatttcaatattaaaagaaaaacttccgctattgtagaggattcatctacatttcggaagttggtatgtgtcttttttattaaatttaaagatgctacggttagttcaaatgattatgaatgacatttcatggtatcatccagcctcagtacttggagataacattttggcggtgagacagaaatcatatttttacaaaatttattggggtgtaacttctccacgttgtatttcactatccaaattttgtttcatattttcaaacaactcttgaaatctaacctcatcttgatcagaataacctttaaaaataactgaatctatattttcctcgttaaaataataaatttcatcttccacaacaccaatcggatatttacatgcagaatagtcaaacatatacttttgattttcaatttctacaattggtcctctattaataatcattagcttttgcgaaccttcttttaaataaataatgcttcctattgtttccatttattttcctcctttgtcaccgtctcaatttcaacattccttcgcatttccaagtcaatcatctcttcttccgctttacgaatgccatgttgaatttgctgttgctgctcgtataacgcttccgttgaacgtcgtttcgcaaaatgaaattcatcgcggaactgttccatacgactagccatattgctactataataacgctcacctaaatgttgatataattgatctatcgaatgattaagcgcatcactttcatctatcaatgctttaacctctcgcttttcatcatataagtcatccatttgcttatgtttcgctgtgattattttattgatttcatccagtttattcgacatcatttcaccacgttttaatttttaccaatttcattaccaatcattacgtcagtttggtcaaaagcctcaccaactttttgtatattatcgctcgcagttcgtattgcttcagcaacagattgattcttactcatcaaatcatctatcacactatgagcattattatttccacttactgttgtactttcatctttatccggtttcgacacattattacatgtttcaacagcgcttttaatagatgatgatgcactattagtcttgaaaatatcactttgaactgtactcatcatttacacctctctccatttaaattattttaaaattattagaaactgtatcaatatatgatattcaaacattcaattatacttaaatattgttttatgattatattcaaaattattgtatcaataaatatgtatcattcctagaattttattgaacaaaaagttataaaatcacttttattgtaactcaaccttgttttacattacagaaattaacaatagcgattaaaattttattttccaacaataaaaaagcacaaatatttttattgaggcagctgaaggccttctcatagcaaaaatatctgtgcatattattatctcaatctaacgtaataactaacttgttgtatcttgtaaaatcttatccatagaatgcgcaacactatcacggtacatctcaccaaatttcaataaatggaccatcaataaatataaacgataaaattcaagtctataggatgcaccttttgcgagtggataatgtttattatacgcatcataaaattcactcgtaaaaccaccaaataccgttgtaataccgatatcgaattctctgtcaccatataatggcgctggatcaaataacgccggacgaccatcttgtaagaacatataattaccaccccataggtcaccatgtaataaagacggtttactttgatgcttttctaattccgccacaatttgacgtcgcactttgtcatatactttgatatcgttggcatcccatagccctctatttagcaactcatctttcaaatggtccatgcgcttgtcgacaaaaatggtacaccaatcgtcttgccaatgattatcaaaagaaatatcgccaccttcataaggtaatgagaagccaaatttgccttcttcttgttgctgactgtgtaattgagctacgagttgccctaattggcgttgactccctgaagccccttcttctaaatacgtcatcactaaatacgcatcaccgttaacctcgccacttgcaattactctaggtgccgtgatacctgcacgttcaaattcatttaaacctgcaatttctgcagcataaaatgattctttacgtccacgttggacaagtaagaaaaatgtatccgtatctgtttcgactcgatatgcttcgtttacatcaccaccactcactggtgaaatctctttaatatcttttaaaggtaaatgctctaaccattgttcattcatacaaacaccttccaatctacttactttatactataatattgcctaattaggatgatttaatcttaaaaacgttattcaaacttgcgtcaattttcaaaactttttagttttaactaggaaattatgtatggaaatgctagtctattaaaagaatatatttcacatatattaagttgaggatagtaagcctcaaatataatgaaataggagcatactcatgtacaaattaattaaacctttcttattcaaaatcgaacccgaaaaagcacacggactaactatcgatgcattaaaaacgttacaaaagtttccggttttattcccagtcgtcgataaactatttacttataagaatccaacgttatcacaaacgatacaaggtaatacgtacgacaatccaattggcttagcagctggtttcgacaaatcttgcgaagtaccaaaagcattggaacaccttggattcggtgctttagaattaggtggtatcacacctaaacctcaaccgggtaaccctcaaccacgcatgtttagattattagaagatgacgccttgataaatcgaatgggcttcaataatattggtatgaacaaagcactaagtcatttgcgtaaaaatgcttatcaagtacctgttggtatcaatgttggtgtgaataaaatgacaccttatgaagcgcgttatcaagattatataaaggttattgatacgtttaaacacgacgtttcatttttcacagtcaacatcagttctccaaatactgaaaatcttcaaaacttccatgataaagatgaattttcaatgttatgccaagctttaacagcatttaaaaaacaacatgatgtaacagtgccaatttatttaaaactaacgtctgatatggatttcgatggcttaaaagcactattaccagcgattactgagacatttgacggtatcatcttagcaaacacaacgcgacaacgagatggtttaacttctgctaataaagtcgaagaaggcggtttgagtggtcgtccattatttgaacgtaatttaaaattgattaagtatgcttatcagcaaacaaatggtgaatttttaattataggtacaggtggcgtattcagtactgaagatgcaatcaaaatgatgcgtcacggtgcgtcacttattcaaatttattcatcacttgttattgaaggcccaggtttaactaagaaaatgaacaaaggcatcgcacgttacttaaaagatcatcattttgacaatgtcagtgatattataggactagatgcctaatccaacatagtcaaataatactttaaaacttgctgaatcgtcttattaaaattatgatataactcaagaagatatatttatcaacatttttcaaaataatggcttaaatatcacatatcattaaatatagcgttttataacggaggcgtttgttatgactaaagaaacagataataaaaaaacagtagcgacttctgacaacaaagacacacagcaacaaaatcaacctgaagaagatgaacgtcaaggtttgaatggttatcgtaaaacagatcttgatttagaaatcgagcaagagctacgtgaaatgatgaaaacaggagaaaatgaaacgaaaaatgactacaaaaagtttaaagtgttttcacttatttcaacacttgtcattgtcattttagcaattataagatttgttcataaaatgatgtaattagagtgagacattgttttatgtctcaggatccagttattcattatagctacaatatttacgattatataaataacccgagattttagtatgatttatttcactaaaatctcgggtttctatttgataatttttaatagggcatggcttgtatatgcgcctgccttttatctcatttccaatgattaatctggatattgttctaaaaatgctttcgcttctttattaactgttttaaaatcaataccttgttgcatcgctgcaaagacacatccacaataacactgtctaaagatattatagtcattacacatttctatggaacgctcataacctttacttttcttaaaatcacttggcaaatagttcacatcgtatattttttggacatccataccaagttcattgattaattgtgcgttctttttaggtgataacgtgattgcactgccaaaataatcatagccatgttctacagctgctttcgctacaatatccaaacgcatttcaaaacaagcggtacaacgtaagccgccttctttttcatcagctaattctttatccttcaccattttcacaaacttatgcggttcataaggtgcttcaatatacttcacattcgcaccagtcttgcgattaaaatcttccacaaattgttcttgcactttagcacgtcgtaaatattcatttttcggatgaatatttgaattcgcgaaataaattgcaatgtctgcatattgtgttaaaaactctaatgtatatgtactacaaggtgcacaacaactatgcaataagattttaggtctgattgcttctctttcccactgcccgattaatttcttcaacaccttgtcataattaattttttgatttttcattttactgataataggttcagcattaatcatgatttaacctcccacatttaatcattaacttctattatatatgattcatattaaatgtcagtcaaaaaagttagaaattcattttaatgcatttatatttcgaaaatcccttatgtatctaaaagcatttttaaacttgaattttaaaacactaaacaacacatacgtctctgtgtcatttttattttttgtatgtcatatatatgtttactttatttaaatcaattttatcttataatttatcgtgtattttacaaaagattgacttcaattcatcgtaaaagttatacttttgccattttttaatgtaacatggtgttagtaataaaaataatacattgaggtgttttacatgacagcattattcccttatatcgcttttgaaaattcaaaagaagcccttgcatattacgaagaagtatttggtgcaactgacgttaaacgtttagaagttggcgaagaacaagcgtcacattttggtatgactaaggaagaagcgcaagaagcaactatgcatgctgaatttgaagtgcttggcgtaaaagtgctatgttctgattcttttggtcgcgctgacaaaattaataatggcatatcattattaattgattatgatgttaacaataaggaagatgctgataaagttgaagcattctatgagcaaattaaagatcattcttcaattgaaatagaattaccgtttgctgaccaattctggggtggcaaaatgggcgtctttacagataaatacggtgttcgttggatgttacatggtcaagactatactgcaatccaacaataatgttattgataaagatatcatttaataagcttatgttatttagcaaggcaagccactctagattcatggcttgccttattttattgtatatttttaattatcgttgctggcccttgattgacaatcgtattaaaatgccttattaagtcaactttgtctatacggtttggatcttctacccaatgtcttatcaaagataatcccgcacctgaaacataactcatgaaataggaaaatggtataccattaatttgatcattttcatttttataacgttgtaaatgacacataattaagtcatatagtttttcgtgtatatttgaatctttacccatacgaaacatcaattgataaaatgcgatgtctttttctatcatatctattaaaacagtcataatttgatgtatgttatccgtggataacttaactgctccatttaacttctcatcatgaatgaagtctcttatttcctccaactgctggtcctctaatttttcaagcaaatcatatttatcataataatgcgtataaaatgtactacggttaacatcagctaaatctgcaatttgttgcacagtaatctcttctaattggtgttgatgtaaaagttcaataaatgcatttctcattgcaacttgtgattttctaatacatcgatctatagtcatttatatcaagtcctccccaatgattataaacaattataaacgttatgttcattatcccacaaatctccaacattgatgattggcacacaatgtttacctgtttaatataggtgatacaaacaaacagaaaaaggtgataacaatgaaccaacatttactaggaaatccaaaattaactgtaactcatgtcaatgaagttaaagccggtattaaccacatcgttgtcgacagtgttcaatatggaaatcaagaaatgattatggaaaaagatgtcactgtggaaatgcgcgatggcgaaaaattatatattaatattttcagaccaaataaagatggcaaattccctgtagttatgtctgcagatacttacggtaaagataataagcctaaaatcacaaatatgggtgccctttggccaacattaggtgccattccgacatctagttttacacctgaagaatcaccagacccaggattttgggtgccaaatgattatgttgtagttaaagttgcattacgcggtagtgacaaatccaaaggcgtcttatctccatggtcaaaaagagaagcggaagattattacgaaatgattgaatgggcagcaaaacagccatggagtaatggaaatatcggaacaaatggtgtttcttatcttgcggtgactcaatggtgggtcgcatcattaaatccaccacatttaaaagcaatgattccttgggaaggattaaatgatatgtatagagaagtagcctttcacggaggtataccggatactggcttttatcatttctggatacaaggtatttttgcgagatggacagataatccaaatatcgaagacatgattcaagcacaacaagaacaccctttgttcgatgatttttggaaacagcgtcaagtgccattatcacaaattaaaacacctctactaacatgtgctagttggtctacacaaggtttgcacaaccgtggctcttttgaaggatttaaacaagctgcatctgaagaaaaatggctatatgtgcatggacgtaaagagtgggaaagttactacgctagagaaaatctcgaacgccaaaaatcattctttgatttttaccttaaagaagaaaataacgattggaaagatacgcctcatgtcatttatgaagttagagatcaattttataaaggcgaattcaaatcagcgtcagcgttccctttacctaacacagaatatacaccattgtatttgaatgctgaaaatcacacattgaatcatgcaaagattagtagcgcgcatgtcgcacaatatgactctgaagataaacgacaagatgtaagttttaaatatacgtttgacaaagatactgagttagttggaaacatgaacttaaaactatgggtaagcactaaagactcagacgatatggatttatttgcaggtattaaaaagttagatcgtcgtggtaatgaagttaacttccctgattttaatcatattgaaaatggtcaagtagctaccggttggttacgcgtatcacatcgtgaattagatcaagaaaaatccacaattgcgcaaccttggcataaacatgaaacagaattaaagttgtcacaagatgagattgtacctgttgaaatcgaattgttaccttcaggcacgctatttaaacaaggcgaaacattggaagttgttgtaaaaggtagtgaaattgtaattggtaatagtacccctggcatgaaaacgcgttatgaacatgaagaaaccgtaaataaaggcatgcacatgatttatactggtggtaaatatgattcacaattaatcattcctatcgttaattgatatgcagcaattacggtcgcttttgattaaaagtgacatagtgatagaactgtataacaagagcaggccacacgcttggaatcttaaaccaaggtgtggccctttttattattgatggctatttgattttataaatcttgtcactaaacttactacaagcaatattaaaccactaaataaaaccattattgctgtattactttcgttgtttactcctgtttttggcaaatctttcaattgttgcttatgtcctgacttgctcttgctatccaaatgaatactttgttgtttagccatttgtttattactttttgtgtgagtatcatttgctttaacacttggatttacagcaccattattcgatgttacatttgcgtttttcaactgcttgataacttttggatctttcgtgccatccattaaattatctggatgttttagtaaatgtctacaatccgatactattccagatttttttgcctttaccgcattattctgcacctcattatcatctttcaactgcttgataacatctggatctttcgtgccatctattaaattatcaagttttttcacacgtgctatgtcactaactggcccaggataatttgcatccggttgtctaactggtattaaattgctgttttcattcacaccttcaggcttgttattttcggcgttcgcattatccgtaaaaatcaacactgataaaattgcaacaaataaacttataacttttttcatcatatccaccttcttcagaccatcattctattttgtataattttattatataattgctatcaattcaatatttttacttcacgaaactaaacaacatgtcattaacttacctcgttaagttaagaattctattttctaccaaataaattctgcatactgttttagataatcaattcacaaaactatttctttataaatatgaccatcatttaacactgataaaattgcaacgataatacctttacttctattacgctaacccaattggcataaaaataaaaacccctaatggataactacattgttatctactagaggtttctaacttatactattttataacactatcgtattttctttttcatgaatcatttcaataatgacattgtcttcattcattactgctactttaggtgcatggtttttaatttcttcttcattcaactgtgcataagtcatgattatgactacatcgcctacttcaacaagtcttgacgctgcaccgtttaaacaaattttaccactacctctttcaccagctattacgtatgtttcaaaacgtgcaccattattattattcacgatggctactttttcatttggcaagatgtctaccgcttccaatatatctgaatcaatcgtaatgctacctacataatttaaatttgactcagtcactcttgctctatgaattttagcattcatcattgttcttatcactttattcagctccaattattatattatctattaaacgcgcttttgaaaatttgacagctaacgagataaatatgcgtccagttatttcgtgttgttctactaattgaggataactataaacagcaacttcttcaatgcgtccacttatatgtgattcaagatattcagtaaccctgtctataattactttactttgacgttcaccgtcttgatacaacgcttgtgctaatagcaaacttttacttaaatgtaccgcttcttgtcgttctttctccgttaaataaacatttcttgaacttttcgccaaaccatctgcttctcgaacgatatcaataccaataatttcaacggcatgattgaagtcttttaccatttgctcgacaatagccaattgctgggcatcttttttaccaaaataagcataatccggcataacaatattaaatagcttattaactactgttaccaccccatcaaaatgccctggacgcttcgctccttctaacacatcagctaatggacctactttgacatcaatacctaattcacctggatacatatcttctactgcaggatgaaaaacaatgtccgcccctacttctgatactaattctaaatctttatcaatttgtctcggataagcatcgaaatcttcgtttggaccaaattgtaatggattaacaaatacactcacaactgtaatatcatttgtactaactgattcgcgtaccatcgttaaatgtccatcatgtaaggcacccattgttgggataaaaccaatcgttgtgcctgagcgtttggctgctttaacaatgtgttgcatctcttttaccgtagtaatcagcttagtcattgttattaacctcattcataattttctttttatacgtatattcttctgatggaaatgcaccagatttaacttcttgatcgtattgctttaaaccatccacaccaacactaaaatcagcaaattgcttcacaaatttcgctttatgttcaacaccataatttaacatatcgtgataaaccaatacttgaccatctgtaccttttcctgcaccaataccaatgactggaattgttaagtgcttgctaatttcttctgctaaatcatttggaattgcttcaagtactaacgcaactgcaccagcttgttctacatttttcgcatctaaaataagttgctccgctgcttctttcgttgcaccttgtaatttataccccataacgccaacactttgaggtgttaatcctaaatgtgcaacaacaggaataccaattgccgttgctttttcaataaatggtgtaatatgcgctccttctgctttaattgcatttgcattcgtctcctgataaagctttagagcatgatttaagtcttgtgtcatagagatgcctactgcaccaatcggcatatcaacaactacaaatgtatttggtgcgcctcttcttactgcacgaccgtgatgaatcatatctgctaacgtcacttgtacggtactttcataacctaatacagtcataccaagtgaatccccaacaagaatcatatcaatacccgctgcttccacttgtttagcacttggaaaatcataagctgttaccatagaaattttagtttgcttttgtttcatatctattaattgacttactgttttcaatgttattcaacctctttttgcagtattattagaaatagtataatgaatcttttatagaaaggaaagaagaagatgttatcagttgcgattatcggcccaggcgctgtcggtacaactattgcctatgaattacaacaatcattgcctcatacaacgcttatcgggagacacgccaaaacaataacatattatactgtaccacatgcacctgcacaagatattgttgtgaaaggttatgaagatgtcacaaacacatttgatgttattattattgcggtcaaaacacatcaacttgatgccgttattcctcatttaactcatcttgcacatgaggacacgctcatcattttagcccaaaatggttatggtcaactcgaacatattccatttaaaaatgtatgccaagcagttgtctatataagtggtcaaaagaaaggcgatgttgttacgcacttcagagattatcaattacgtatacaagataatgcattaactcgacaatttagagatttggtccaagacagtcaaatcgacattgtattagaagcaaatattcaacaagctatttggtataaattgttagttaacttgggcattaattctatcacagcactcgggagacagacagttgcaatcatgcataatcctgaaatacgtatactgtgtagacagttattactagatggttgtcgtgttgcacaagcagaggggttaaacttttcagaacaaactgtcgatactattatgactatatatcaaggttatcccgacgaaatgggaacgagcatgtattacgacattgtgcatcagcaacctcttgaagtcgaagcgattcaaggctttatttatcgacgtgcacgtgaacacgatcttgacaccccatatcttgatactatttatagctttttacgcgcgtatcaacaaaatatgtaagcacatatttaatataaaaagaccttaacgatgcatttagaaccacctgtcccttatatcgctaaggtcttttaattatattagactattcagcttctctaatttcttctgccacatctttatagtctattttcgctttaacaaacgtctcgttatttaccgggaaatgttgttggaatgtttcaaagttttgtatctcaacaacaacgtcatccacttcaaagtcaagaacatgtccaccataagctctttcatcatccgcaaaatgtatatgaaaaccagcagaccctacgccatgaaataattctggtgtaaaaaatccaacaatggcaccacgaatatcttgtcttttttcctcaggttgtctgcgtgctgaatcaatcaaacgtgtatatggcggttgctgagcaggcatcattcgtacatgcatatgtttaaatgtgccataaattttaacagccgaaaataaattctcactcaacatttcatttttaatttgtgcgaatacatcatcttgtgataattgttgcaatggaaatgtcttactcgctttaaaattagtaatcgatgcatacggtactttctcatcgccttttaattctataaattctttatgctcgttagcatgatatgccttcccgtctaaaaatattacttcgccatcagaccctgttaacgttgcaatccctaaattcccatgttctaacaattcattaattgtagctgttccttctagtaagccagccattaacgtacctaatgtaccatgttgatacaagacattcgtcattccaaaaccatctccctatagttattcctcgttgtcatgctctacttcgtgcttaatgcagaactactttcctttatactcaatgacgcctcgacatttctattcatgtcactaaattttcacgagtcataatactttattcaattattattttacgcaaaagtattgcctctatcaatgcttgctaaaaaaatggacctatcagtgccacatgttaccgcaacactaatagatcctcttaccattaatatatttctaattaatacttaaaataggcttagtcttctaataaatatttaattgaatcgaaagtatcttctaatgttttaactgatttgtcgaacaatgcttgttcttctgcacttaatggcatttcataaattttaactgcgccatgttggttaactaatgttggtacacctaggtaaacgcctttgtgaccaccatattgaccatctaattgtatagaaacatttaagacattattttcattatttaaaatggcttttgaaatgcgcatcaatgctaatgcaataccatagtatgttgaccctttagcttggataatttcataagcagcgtcacgtgtatttacataaatttcttccgctttagcttcgctaccagtttgttcttttaatgtgtcatatactgaaatacctgctacatttgcttgtgaccaaactgcaagttcagtatcaccatgctcaccaataatactagcgtcaacacttgaaggtgcaacaccaagttcttggctaattaaatattgtaaacgtgcactgtccaatacagtacctgaaccgataacacgctctgctggcaatccagtatattcttttacaaatcttgttaaaatgtctacagggtttgccgcgattaagaaatatccatcaaagccgctatccattacactcttaacaatgctcttcataatcttagtatttttttcaactaattgtaaacgtgtttcacctggcttttgaggtgcaccagctgtaataacaactaaatctgcatctttacagtcttcgtattcacctgctttcacatcaactggtgaaggactgtggactgtaccatggtttaaatcttgaacatctgcttttactttgtcttttgcaatgtcaataattacaaattcatcagcaacaccttgcgtaaccattgcaaaggcatagcttgatcctacagatccatctccgattaatacaacctttttaccaaatgttttcataattatgtctcctaacctaattgaatttattttacacgtgactacacgtaaaaatatctatactgaaattaaagattaacaattttattttattataatattatgctaccaaattacaaacataaaactgagatgtaagcggagtcaaattacactctaacgccaataaatattgatatctcaagctttagcacgtaatttgaaatttgtgacaatttttagcattctaaaattgcgtaatgacgctatttaaaggctttaacaaactattgagctttctatttttttcattttaaaaaggatggctatccgacttaaatgacttactatataacctcctattttccgccttaccctcatcatatttgatgcatctttttatagtcaaaaaattacatttcatacaaactaaccaatcagacataaacatgaaattgattttaaaaatataatgcgcaaaattgttagaaaattagcaaaaaatagtacttattcatttaatatctgttataatcagttttatcatttaaaaaatctatggatgttatcaagacaagtcattaatacgtaacataaagttgttatttttcagaatttttagacaaaatattgattatttgtgctatgatataacatattaaaaaacaccgtatagaattgtttatgaatgtttgggaggaaagtttatgggaagttttttcaataaaatagcacgaaaagaggatccggctatctatcaaaataaagatggtcatttaaagcgtacacttcgggtgcgtgatttcttagctttaggtgtaggaacaattgtatcgacatctatctttacgctacctggcattgttgctgcagaacatgcaggaccggccgttgcgttatcattcttactcgctgctattgttgctggtttagttgcatttacttatgcagaaatggctgccgctatgccatttgcaggttcagcctattcttgggtcaatgtattattcggtgaattctttggatgggttgccggttgggctttattagctgaatattttatcgccgtagcctttgttgcatcaggattctcagcgaatttacgcggacttgtgaaaccaattggcatcgaattaccagcagcattatcaaatccatttggtacgaatggcggttttatcgatattattgctgctatcgttattttattaactgcattattactatcacgtggtatgtcggaagcagctcgtatggaaaatattttagttattttaaaagtattagctattattttatttgtcatcgtaggtttaacagcaataaatgttagtaactatgtgccatttattccagaacacaaagtaactgctacaggtgactttggtggatggcaaggcatatatgctggtgtttcaatgattttcttagcgtatatcggtttcgattctatcgcagcaaactcagcagaagcacttgatcctcaaaagacaatgcctagaggtattcttggttctttaagcgttgctatcgtattatttattgctgtagcacttgtgttagttggtatgttccattactcacaatacgcaaacaatgctgaacctgttggttgggctttacgtcaaagtggtcatggtgttgtagcagctattgttcaagctatctctgttatcggtatgtttacagcattaattggtatgatgttagcaggctcacgtttactttattcatttggacgtgacggcttattaccttcatggttaagccacttaaacgacaaacatttacctaatcgcgcactagttatacttactattattggtgttttaattggttctatgttcccattcgcatttttagcacaattaatttcagccggtacacttgttgcatttatgttcgtttcattagcaatgtatcgtttgagaaagcgtgaaggtaaagatctaccaattcctgcatttaaattacctttatatcctgtgttaccagcagttacatttgttttagtattgctagtattctggggattaggattcgaagcgaaattatacactttaatttggtttattgttggtatcattctatatttaagttatggacttagacattctaagaaaaatgacgtagctgaataccacccaccaaaataaaaatcaaaaaaatcatttcccatctgattaacatccagatgtggaaatgattttttattttatattaagataatcgctattaccaaccttgtccagatatgtcatattgatctaagttacctgcttccaaagcagtcagtgcatcttctatagtgtttaacgccgtgtctaattgctcatatgttatcaccaatggcggttggaatcgcaacacatttcctgctacagctataataactacgccatgctcaaagcagtaattacaaattttaagtgccgcactggcatcacgtgttttgagttttttgtcggaaacaatatcaataccaatgctcagacctttacctctaacatcgcctacactattgtatttagatacccattgatccattcgtttcctaacatattcccctttttccgcactatcctgaagaagcgactgatcttcaatcatttgaattgtggctaatgcagcttcacaactaactggattagcacctgttgtaaataaatgtgctggtgcttctaaacaattcataatctctttgcgtccaacaattgctgacataggcataccacctgctaaggattttccaaaagtgattaaatcaggcgtaaaattaaaatgcgagactgaactccatgtacctgttcgcccaaaaccttgttgaatatcatcgacagcgattaaaataccatgttcacgacaaatcttttctaacgcttcaaaataccctggaactggttctaaaagtccaccatcgccttgtatcgtttcaataacaatacatgctacttcgtcagcaggtacatatttcgcaaacatttcttttaagggtgctaaatattcttctactgaattagcttgtggctgctcgtacataccacgatatttatctggaaacggaatatgataaaaaccattcaataacggaccataatgtttgcgcatatttaaactaatagctgacatagacaatgagccaaaagttgaaccatgatatgcgttagtgaaactaatgatataaggacgccctgtatatgctctggcaaatttaatgatgccatcatttgcgtctgatccggttaatccgaaggtcactcttttttcaaaatctccaggtgcaagctcacaaagcttcttagctaaacgtaccaacggttcatgatacatatatgctggtgtataatgaataaatttatcaacttgtgcctttatcgcttctgttacttctctaggtgcatgacctacgttttgagaacttgcactcgataacaaatcgatatatgtcttcccctcaatatcaaccaatgttgctccatatccatgatcaatcactaacggataatatttaatacgtcctgatttcgcaaaataatgttcatcctcttgaattaattgatgtgctttactcatattcattcccctcccattgacagtattaatgtgcaagcaaagtggcctctcttaaatcgattataaaatccgatttaaaatcctgctcaaataccgtcatgcctctatgaatactatccaatatactaataaaattcagatttgtaaatatattctgataattaagaattttatatcaatctactttgtttatgcgcataattttgttcgattagggaattgtttactatattccatttgactctgaggtgatacgaatgcgtttaaaagtattgttccatttcattgctgctattttcatatcattcatgttgctatggatgaccatgttgtttgacttaataagcaatcaatcacatttaaaagctttattattgaatttagattttctaattccttctgacaatacaccatatattctagaaataatatgtcacttactaattggtagcgtcatttattttgtatttgtgttgctgtttcatacttctaaaaggctttactatctatgttatatccctttatttttcttatttatagcattgtatccctttttagtatttattgcgcaacgtccaatttttcaatttagtgtgacagaattaatcggttggattattacacatattttctttatgtcattaatggcgttagtcatacctagaataaaataatatttttaattaaactgacaattatttttcacattttatacacttttcaaggtttatgacttgagaaatgttctcatttttatcatactggaggtgtattgaaaagttaaggagtggaaagtatgaataaagagcaattagaaaaaatgaaaaatggaaaaggctttattgccgcattagaccaaagtggtggtagtacaccaaaagcacttaaagaatatggtgtaaacgaagatcaatatagcaatgaagacgaaatgttccaacttgttcacgatatgcgtacacgtgtggtaacttcaccttcattctcaccagataaaattttgggtgctattcttttcgaacaaacaatggatcgcgaagtagaaagcaaatacactgcagattacttagctgataaaggtgttgttccgttcttaaaagtagacaaaggtcttgctgaagagcaaaatggtgttcaattaatgaaaccaatcgacaacttagacaatttattagaccgtgcaaacgaacgtcacatttttggtacaaaaatgcgttctaacattttagaattaaatgagcaaggtatcaaagacgttgttgaacaacaatttgaagttgctaaacaaattattgctaaaggtttagttccaattatcgaaccagaagttaatattaatgcaaaagacaaagctgaaattgaaaaagtattaaaagctgaacttaaaaaaggtttagatagcttaaatgctgatcaattagtaatgttgaaattaacaattcctactgaaccaaacttatacaaagagttagctgaacatcctaatgttgttcgtgtcgttgtattatcaggtggttacagcagagaaaaagcaaatgaattacttaaagataacgctgaacttatcgcaagtttctcacgtgcattagctagtgatttaagagctgatcaatctaaagaagaattcgataaagctttaggtgatgctgtagaatcaatctacgacgcatctgtaaacaaaaactaatttatacattaaactattttttgatataaactactaaaaaggactcatacatgtgctttaaaggcattgtgtatgagtcttttttgattaaagttgattttgccgtatgtattagattacgtaaaaaaatcggacagctgaaaaatctttaagatttctcagttgtccgattttaaatatagctattagaatttagttttcgtagtaacctaattctaagtcttttgaagtttgtttacggatttttctcattaatttttcgtcttcaattaatgattcaccgtatgatggaatcattttcttaattttaggtgcccattcagttttgtattcagggaagttacgttctaatacttctaacgcaactgaaactgaagttgaagcccctggtgattcacctaataatgcaattacagtgtggtcttgtgagttaaccacttctgtaccgaattggatgaatcctttaccgtgttcaggtgtatctttgataacttgtacacgtttaccagcagtgtataattgccaatcttcattacgtgcttctggatagaaagtacgtaagtggttcatacaaccttcttttgtcataattacttggtcaaatgagtatttaattaaaggtaagtttttaactgctgctgctaataaagttgtaatgttgtatgttttaacagacttgaataaatctaagttagaaccatttttcaagaatttaggtccaacattagcaaatggtccaaataataatgttctttgaccatcaatgtaacgcgtatctaaatgaggtacagtcattggtggtgtaccaggtggctctttaccataaactttggcatcgtgttgttcaataacttgtgggtttgtacaagctaagaattgaccactgatagggaatccacccaaatgtttactttcagggatacctgttttttgtaataatggaattgctccaccgccagcaccgatgaatacgtagtcagttacttgtttgaatttctcaccagttaggcgatttttaacagtaacttcccattgaccatttgataattgttcaaaatcaacaacttcatggttaaattgcactgtagcatttggatgtgcttcaatgcttttagccattttacgtgttaattcaccgaagtttacatctgtaccttcgtcaattttacttgccgccatgataccagggttatcttcacggcctttcatcatcaatggaatccattttttcattacttcgatgtcttcagtatattcgatattatcgaacatagggaaagctttcatcgcttcgtaacgatcttttaagaatttaacattgtttttacctctaacataactgatgtgtggtaatggattgataaattctcttgggttctcgatgctaccgcttttcactaagtgaccccagaattgttttgaaatctcaaactcttcgttaatcactttcgctttttcgatgtcgatagaaccatcaggttgtaaaactgtgtagttcaactcacataatgctgcatgacccgtaccagcattatttctttcgtttgaactttcgattgcaggacgatccaagcgttcgtaaacgtggatattccagtctggctcaatttcttttaacattgaaccaaatgttgtgctaagtacaccggctccaattaaaacgatgtctttactattagacttagccattggtttcacctctccaaaaattgtaaatgtgtatcatcaatatgaaagttacataaaactgacatatttctttaaaatatcaacgccattgataacttcctgttttaattgatacgctgtaacaaaatactatagttagtgcttacatgtatatgttaaagcaagcagtggtaaatgtaaattataattattcattaactttgcaatatattaaatcttttattcatagaagataaatatcaaatcaatcataattatttgacaacaaatagctaacgattgttttaatctacatttggcttatagcattttaaacctatactctattttgatacaatataagtgtaaaatcaatcataaaaaggatattcaatatctgcatccaagaaaaacattacaattacctttaatattgaaaattattttgaatcttgcacttataggtattgtaattatcgttctaacacatactgagtttcaacttaatgccggtgatagtaatgtgtttttattaaactgggatattcgaggtttaacatcttatattttctcattcttaatactggttgcgcttgtttctaaactaattttaatatttataactagacgacaaagaacatcataaataaacaagcagtccagtgcgtatcatcataccttacgcattggactgctttgctatgtttattgattgctatctttttgttgttgccatttttctatttcagcatctcgtagttcaacacgacgaattttacctgagtttgtttttggtaagtcgtcaacgaattcaatctctctcggatatttatatggtgcaacttcatttttaacaaattgttgtagttctttaactaacgtatcatcacccgcagtatggtcctgtaaaataacgaatgctttaacaatatttcctcgtatatcatgaggctttgctactacagcacattctttaacggctggatgattcgttaacgcatcttcaacttcaaaaggcccaatcgtatagcctgaactaataataatgtcatctcgacgtccttcaaaccagaaataaccatcatcatctacatgagctaagtcaccagtgatgtagtatttacctgtttgcgctttcgccgtacgttctggctctttataataccctttgaaaagtgctggcaaatcaagtggtactgcaatattccctttcgtattagcaggtacgctattcccctcatcatctactacagtgaccgaactacccggaatgcctttacccattgatccaatcctttgtggtgtatcttttaaaaagcctataagcaaggtactttcagtctggccatatccatctcttacagttaaattaaagtatttcttgaattgttcaactacttctcgatttagtggctcacctgcagaaacggcactatgtaaatgcgttaagtcataatcatttaagttctgtaatttagccatcatacgatattctgtcggtgtacaacataaaacattaatttgatatttttgaagcaattctaagtatgtttcaggactgaatcttccattaaatacaaaagcagttgcacctgaacctaatacagataagaaaggactccatacccatttttgccaacctggtgctgctgttgcccaaactaagtcatcttcattaatacataaccaatgttttggtgccatttgtaaatgtgcaaatccccatccatgacaatgtgtaacggctttaggattgccagttgtaccagatgtatatgacagaatcgccatatcatcacacgtcgtatctgccatttctagtttgttacttgcgttttctttttcagcttcaagtgaaatccatccatctttttgaccggcaataacaaatttagttaacgcatcatattctttaattttttcaaattcaactgtgaatggctctaatgcaataactgcatttatttcaccgtgcgtgatacggtattgtaaatctttagttcttagcatttcagaacatggaatgattgcaacacctaattttaaagcagcaatatataattcatacgtcgcaatagatcgtggcatcataatgagtactttatcgcctttagataaaccgtgcgatgctaaaacattacctactttattagactgttcaatgagctgttggtaagtgactgatatatcttcgcctacagtattatgatatagaattgcctttttatctggtatgtggctatatttttcgatttccgaaataatgttatatttttcaggcgcgaatagagctgacttttgcataactaacttcctttcatacatccacttttcctgtgatgaacattgtaattttataaatgaattatatatatcatacgcctatctttacagaattttcaattaaatagggttaaataccaaagtcctcgacactacactttgacatgacgtagcattcaaggactttcaaatgattgagggtcgatatctcgggctagaccatatcagctaattcaatacgaatattgtatgataattcacgattaattatttttacatctgcacctttcgaagtgccacgatgcttgtgtgtatgcttgtactcagctgaattttgccaatgataaaatgcttgcctattttcccacagcgtaataatgatatagtgtctaccagctgttctaggtcttaaaaatcttaatgatttaaatccatcaacgttttttaaatgcttattacgttgcaaaaatttttgctcgaatgtttcttcttgtccttcattaatatataaatgatttaacacacataatgaatcatttgataaatcatttatcgcttctagcacatcgtaatatgcagtgtcattatttttttgtattgtgagacaatcatccagttcttctattacataacttctatattcatcataaattttcataataaatgccttcatttcatttatatttttggtcatattactttatatctattactaattcattcccgtatttattaattacaatcatagtttggcttctttttaaaagagaagactttgtaaaaagtgttaatatttcatgcaaatggggacaggagtcgcccactatttttgtgtcttcaatttcatgatcattatttaacattagtcatgaaaatagccgacaacttcatctgtgaaatcaccggccttttattttagctaactttatttctgattttacgattttaattgatcatacagagaaagtgatctttttacaatttctaaaaactcatgatctatattggacatttgatgaaaataagacaaaatgttttctgttagcttctcttgttttgggaatgaatcatcttctttaatccaaatcgctaattcgcctaatggtgttttatcatctttaaatgtttgtatatattcgtaaaagctcatagtattccttctctcaatttacttatataaatcctaccacgaaagctttcaagaaaacacaattaaatgtctatttagtgaactttttaaggttgtacactcttttaatgtctgccaattaggtcaattaatcatcacaatgtacaattaactctattttcagttcatttactcacacaccgtttttgaacaacacattaacttctcatttagataaaacgcaaaaaaagtctggcaccaatacaatagatgccagactaagagtctactatataaatttatttagcgtatggttttacttcgattgcaccttcattttcatcatgaacaccatgcttataataatcaatatattgtggctctaaaggctttctgccacgtataatgtctgctgctttttcagctaacattaaaacaggtgcgtgtatattgccatttgtcgtacgtggcatagcggatgcatcaactacacgtaaattttccataccgtggactttcattgttaacgggtcaactactgccattggatctgaagcaggacccattttagcactacaagatgggtgtaatgctgtttcaccatctctacgaacccaatccagaatttcttcgtctgtttgcacttctggtcctggtgaaatttctccaccattgaatggatccattgctttttgagataagatatttcttgctacacgaattgcttctacccattcttttttatcttcttctgttgataaataattaaagcggatacttggtttttcgaatggatctttagatttgattttcaagctaccacgagagtttgaatacattggtcctacgtgaacttgataaccatgtgcgaccgctgccttttgaccatcatatcttacagctattggtaagaaatggaacattaagttaggataatcaacttcgttatttgaacgtacaaatccgccaccttcaaaatggttagatgctgctgcacctgtacgtgtgaaaatccattgtaaaccaataaatggcatgcgcttgatatctaagcttggctgtaatgatacaggttccttacatttatgttgaatgtatacctctaagtgatcttcaaagttttcacccacaccaggtaaatgaacacgtggctcaatgccttttgattttaggaactctgaatcaccaataccagataattgtagtaattgtggcgtattgaatgccccaccagacaagatgacttcattagcatcgatggtatgtagtttgccatttttcttatacgtaacaccagttgctcttctaccttcataatgaatttcagttacaaaggcacgtgtttcaacggttaagtttttacgcttcatagctggatgtaaatatgctcttgaagctgacattcggcgaccacgatgtacttgactatcgaacggtccaaaaccttcttgtctaaatccattcacatcaggtgttttatgatagcctgcttcaacacctgcatcaaagaatgactggaataaaggattcgttgctggccctcgttttaacttaattggtccatcatggcctctaaatttatcataaggcgctgcaccgtatgttttttctaattttttaaaatacggtaagcagtgcgcaaaatcccaagtttccataccttctggttctgcccagccttcatagtccattggattaccacgttgataaatcatgccattaatcgaacttgatccacctaaaactttacctcgggcatgtgctactttacgaccgcccatatgtggttcttcatctgttgaataaatccaatcgtaaaatttattgcctgaagggaacattaacgcagcaggcatttggataaataaatcccaaaaataatcactgcgacccgcttctaatactaagacttctttatctttatcttcactcagtcgattacctagtacagaacctgcactgcctcctccaatgatgacataatcatatgatttatttttgttactcatcgttatgacctccaaagtttgttgtatttcaaagtgagtattgcatgaaatatttgttagtcgctgattggttatcgttgaattgctaaacttagctaaccaaaacactcgattttccttttatgattgttactaacagtcatgaaacaatctatgattcattttgcgtttagttcaaattatcaattaacatttcgccacttatacaaaacaaagtgagtgtcttgtgttcttacaatggcactcaccttatctaatttttatttgctaaaccaattcactaattgtggatttgtatttgttaaaatgtgttttgaaacaaggtactcttctaagccttctttgcctaattctctaccgatacctgattgtttgtatccaccccatggcgcttgtgcaaaatatggatggaaatcattaatccacaccgttccaagtttcaacttattagcaacgcgttgtgcttttccaatatctttagaaaatacagcacctgctaaaccatatatagaatcattcgctaattgaatcgcttcttgttcagtttcaaagccttctacagtaacgacaggtccgaaaacctcttcttgtacaatacgcattgacgtatcacaatttgtaatgactgttggctcgaagaatagaccatcttttaaatcgtctctatctggacgtttaccaccaacagcaattgttgcgccttctgctttagctacatccatataagattcgatcttattacgatgttctgttgaaatcactggtcccatttcagtatcagcatcaaaaccattacctaatttgatttttttcacgcgatcaataagtgcttgctcaaatttgtctttaatactgttttgtactaatattcttgatcctgctgaacaaacttgacctgcatgaaaatatccaccatttaacgcttggtctactgccaattcaaaatcagcatcatcaaagataatgtttggatttttaccgccaagttccaaggcaatattcgtaacattattagcagcatttttcataatatgcttaccagtctcaatgccacctgtaaatgatacaaggtcaacctctttatgacctgacattacgtcaccaacttcagaacctgcacctagaataagattaattgttcctttagggaaaccaacttcttccattaattcaaaaacacgtattgttgttaatggtgtaatttcacttggtttcataactagtgaacaacccgtagcaagcgctggcgcaattttccatgatgcttgtaataacggataattccaaggtgtaatttgtgtaactacacctactggttctttaacaattttgctttctgtatctggaattggtgaatcaatcatttcgccaccatctttatctgctaatccagcaaaatacataaacacattatgaatatcatccatatctgcatatgattcttctaacgtttttccagtatctaatgtttctaatcgtgctaacgcttcgcgatgttctttgatcttgtccgcgatggcacgtacttttttacctcttgtttcagcagtttcttgcgaccattcaccagactcaaacgcacgtcttgcagctaagattgcacgttctgcatcctcttttgtcccttcagaaaccgtaaatatcacttcttgattgtaaggattgataatatctcttgtatttttattcgcgctttcaacccactcaccatcaatatattgacgctgagataaatgttttaaaagttccattcaacaacctccgttaagtttgttaaatttttatttaacgaattttacaaacttatgttagcatagaaatgaaaaatgtgtcaatttacaaaacaactcaagaattaagttttgtaagttcgttagatttttatttaacgaaacatttaactttaatgctttaaatatttttaatgtctttttttagaaaaggttttataatgtattagtatttattttaacgtgaccaaaatgatgtacggaggtgcaatgatgactcgttctcagaacaaacagcaacaattagaacaagcaaaagatattgtaattaattcaattggacagacaatggatttgtatggcactaatagaagtgtaggaaacttatatggcactatggtgtttgaaggcagtatgacgcttgatgaaatgcgtcatcaattgcaaatgagcaaaccaagtatgagtgctggcgttaagaaattgcaggaatttgatattgttaaacaacaatttacgagaggaagccgcaaacaacattttatcgccgagaaagactttttcatctttttccgaaactttttcactaaaaaatttcagcgtgaaattgacatcaatgtcgaagcagtaaaagatgctcaagctattatcaatccattacttgaaagcagtgatttaactgaagctgaaacacaagaggcacaaaaaattaaagctcagcttgatcatacacatgtttattacgaatggttagaacagttaaccgaagcgattgaaagcggtgaaattttcaaatatttcccaattccagaacagccttctgattctgaaaattaaaattgactcaaacaacgacaatgatgattatgcatgataaaaacaatgcaataggtccacgaaataaacggtaatttctatctcaataaatagaaattaccgtttttgttttatatgacaatcaattatatacttataaaattcaaaatcttatgcattatttattaaattataaattatcatcttgttcttcttctgatacttgaacgattcgcaatgaacgacgttcaacttcttttaatttttcagcacgcgtttcaagtttaattctatcgcgtcctaaaatgattaaaaatgatatcatcatgaaaataaaaataacaattaatggcacacttgccagtattgaagcagttttcaatacttctaatgcacgttcgccaccaactagcatcaatgaaaatggcaataagcacaatgcaaatgcccagaataaacgattggcacgtaatggttcgcctaccacttttttctgagatgctgccgctaaaatatatgaacccgaatcaaatgttgttgctaagaataagaaagcagatactaagaatagtacaatcatcaatgatgggaatggtaaatgatgcaccacttcaataatggttgcctctgtaccatgtgtatttaaatattgtgttacattaaactgtccagaaatttgtaaatacacagcatagttaccaaaaataccaaagaataatacgcatccaagcgttccataaataattgttcctagcacgacttctttaaggcgtcgaccttttgaaattctagcgataaataaaccgataaatggcgcatatactaaccaccatgaccagtagaatattgtccagtcttgtgggaaattcgtttcttttcgacctttaataccaccgaatggttctaaccatgttgccatatggaaaaaatctctcaacatatttccgaaccctgtcactgtcgtttccataataaaaacagtcggtccaataataaatataaaggctaaaagtacaaaggatagccaaacgttgatatcacttaacttttgaataccttttttcaatcctgtatatgaactaatggcaaatataaccgtgattgttaataaaatggccgaacgtaaaatcatatttttaccatctaaaccagttaatctttctatgcctgcagaaattaatggcacacctaacgctagtgatgttgccgcaccacctagcaatccaaagataaataagatatctacaactttacctacaaatttatctgtttgaccttttaaaatcggacgacaagcttgactaattttatacaccggttgttttttaacaaatactaaataaccaattggtaatgctggtagaacataaatagcccaagcaattggcccccagtggaacataccatattgcgtcgcatattggagtgcttcatcactcatacttttcgcgccatttggtggaacttgatagtaaaaagcccattcaataacgccccagtataaaatatcagagcctatgcctgcacaaaacagcattgccgcccatgtaaatgtattaaattctggtttatcacttgctttaccaagtgtgacattaccatatttaccaaatgcgatatacattacaaagcaaaaaatcgccagccccataaataaatatatcgaaccaattgaatcagaaatggcactattaataccagtgatgatatcttcacttgcttttggaaaagccatcataggtataactgcaaaaagaagtacagctactgtccctataaaggtcgtccagtccataactttctcttttttcaattgtgctccccctaattattaattttatgaatcctgtttcgatttatctcaaaatgtaataattatattgattcacaaaattgacaataactaacatttaataataatgcaaatttcatacaatttgaaacttggcaattattgaatatttatataatttttcccgtcataaacaaaaacttaatagcgctaaaacaacagtgttaagttacgatttaacgaatttaacaaattttactagaatggcatttaagaatatttatacgttattaacgaatatttatttattgtaaaacgctaccaaaaagttagacttccttcccactaaaataccacttttttctttcaacttttttaaaaaacggatatgcaacttttagtattggtatcaaaatgattgttaggtcatattctatcaatatatttttctaaagaattgcttttattaactttcaattatgtacctaacctaaaaagaagccaaggcaacgaatgttaccttgacttctaatacatattcaactaacaatatattcaatcatacgcgcatgcgagagtgattgttgtacatctataatacgttgatttaaagaacctttatatggtaaatcaggtttgaataagtgttgtataaatagcccatctactaaaacgtcaatgtatgataataactctcgacgttctgcacaatcatttgctaaatattcatataaaaatccagtccatacccaaattgtctttgtatttccaaaacgtgctcgaaatgctttgacaagatttaatgtaatatccaaattacaaaatggttcgccacctaatagacttagcccagatatataatcatgatcgcaatcatctaatatttctgctaatatttcatcagtgtatttctcgccatatctgaacttttgtgaggctttgttgtaacatccaacacaattaaatggacatcctgatacataaacactgcatcttactccttcaccgtcaacaaagctatttgattctattttagcaatataaccttgtccttgtttaatgtctaaaagtgtcattctttaggcgctttcatatgttttactcgtgcgcaaatttctttatgacggcctttaattactggacgttgaactggattgcctaagtaaccacatgttcgtttaacgacatcaactgttttaggattatcattgccacagttcgggcatttaaatcctttttcagttgcttcaaaatctccatcgtaatcacattcataacaatgatcaatcggaatatttgtacctaagtaaccaactttgtcataagagtagtcccataccgcttctagtgctttcaaattgtgttgcaatttcggatactcacaatagtgaatgaaaccaccactcgcataataaggataatctttttcaaaatctaacttttcaaaaggtgtaacatctttacgtacatcataatggaaagagttttgataatatcctttatctgtaatgtctttaatatctccaaatctctcttggtctaaacgacaaaaacgatccgttagcgattcactcggcgtactgtaaatactgaaccaaatgtcatatagttctgtccatttcgtttgataacgtttcatttctttaagaatttcaagcgtaaatgcttttgcttcttgagatgtttcccagtctggaccatagaaaacagtagctgtttcatacaaccctatatagcccattgaaatcgttgcacgtttatttttaaataactcagcaacatcatctgtttcttttaatttatagttaaaagcgccacttttatataaaattggtgcattattcggtacagcatctttcaaacgatttatacgataaagtaatgcatcatgtaacacatcgatacgttcataaaagatttcccagaatttcgtcatattaccggcagattctaatgccattctaggtaaattaagtgtaacaacaccaagattacaacgaccattattttcaaaatgaccttccgcatctttccaacttggtaaaaatgaacgacaacccattggcgctttgaaatcacctaatatttctacgagtttgtcataatttaaaatatctggatacatacgtttcgttgaacactttaatgctagttgtttaatgtcatagttcggatcttgcggactaaagttggttccttttttaattgaaaatacaagtttcgggaaaatcgctgtcgtgcggtcttttcctaagcctttgatacgagtatttaagatagcttgttgaattttgcgacttaaatgatctgtacctaagccgaatcctaatgttacaaaaggtgtctgtccattagatgtatataaggtattaatttcatattctaaactttcaatcgcatcattgatgtctttagtgacttgttgatcaacataacgatcaatttcagattctttgacaaattgctttgcgatattcctatgttgttcttcattatgtcgtgcatatgtactaagtaattcgtcaacgcggtcaaccgtacagccaccatattgactgctagaaacattggctataatttgtacaagctgcgctgatgcagtttgtattgattttggtgaagttacattcgcgttgcctatttcaaatccattatgtagcatatttttagcatctattaaacaacagttagttaacggttggaatggatgataatctaagtcgtgaaaatgtatgtcccctctttgatgtgcatctgcaacgtgctttggtaataaatgatttaatgcgtaagatttagaaacgatacctgctgttaaatctctcattgttgaaaatgtatcactatctttgttagcattttcgttaacaatagcaggatctttagaaatcaaacccgttaatgcttcttcgatttgattcattttaccccttcttcctatatattgtgtctactcattacgttataccactatatatagtattttcaaatttttattagtctgttaactaaaacgtcacaaagttattaacatttagtgaaattcatatttctacacaattatttcattaatttttaaaattgtttaaagattcgtccgtcatttcgacatgtttatgcaactattatttcattttgcaacgtgaccatagtttctattttttcatacttaaatcgtcacaatgcccatcaacattgcaattactaacataacgatagcgaatccccaaatccaaaagaatgcatacttaatatacgtgcccatgtttgcctctgctaaaccaattgccaaccataaggctggtgaaaatgggctgacaaatgtacctataatattccctatgaccattgaataagctgttgatacagacggtacaccaaattgccctgctgtttgttcgacaatcggtaacacagcaaaataataagcgtctgtgctagttagtaaatctaatggtacgccaagtaaacctacaataatatgcaagtatggtcctacttctgcaggaatcactttgattaaattggtcgcaatcgctttaagcataccggtttcatttagtacacctaaaaacatacctgctgcaataatcactgcagccatcattaatgcattcggcgcatgcgctcttaatcgttccatttgttcatccactgatttaaaattaataacaagtgccaacgaaacacctatcatgaatgcaaattcaggtggcgcaatatttattaacatcgatagaataacagctaaagttaaagctgtattcacccattttatccatgattttgttcttgcacgtccttttacaggaaaccttacatcttgatctcgttcatatacttcaactaatttatgtacatctatatcttgtgtttgcggtaattcatttctctctattgcttttttgatacgtttctgttctttaaatccaagatataccgcaaacaacataacaagaatgaaacctattatttgaataggtattaatccataccataattcattgacacttttggcttttaacactgcagctacacgagccattggacctccccaaggtaccatgttcataatcgccgcgcttaatgctaatagtaaaatcaataaatatttattcatatttaacgctttatataaaggtaataatgcaggaatagaaagcaaaaatgttaccgcaccggccccatctaattgggctattgtgccaattaaagctgtcattgcacagacaatgacgacattgcctcgtgtcattaatattaagcgtttgacaagcggcttgaataaaccactatcgttcatgatgccaaagaaaataatggcaaagataaacataataacaacgttgatgacttgatctaaccctttagcaaaaaatccaaccaaatctgtcacactatatcctaaaatcattgcccctaagcaaggtatgattgtcatacctacaactggatttatctttttggcaatgagtaaacctacaattgaaataataataatgagccccattactgttaaccacatattatcactattcatattattttctccctccacttttaatacaatttacataatccccctctttaacttaaatattataattaatataattttttatatttaagttatctcattttatcaaaaaaatcttttttgcgtaactatcaatagtgaagtttgattttcctacttgataacatggcatgactaatccttgtatatcctgtcctgtatttcattttgatctatcatttttattattgctttctattgcacaaaaaatctggctaaaggtcgctatgatagtaacgacttcaaccagatttcaatttatccacctattttattaagtttgttctacgtatctttttctctattgtaatattcatatttaaaacgcatatcattatcgcttaaatccttcattattagactattcacaaagccgcccatgtcttaatttcaatgattaagcgttaaagttaaaataagaagacttaccttagacggttagacggtccgctattattatcttacatccaaccacgctaaaaattgagcttgtttgtcatgatttaaatattcttgtgacacaatttgtgacagtaactgttgcttttcgttatatgttatatcaagtacttttattttctgtcggcaagtatataaaaagtcgatatacgaactgtatgatggtggatataacgcctcaagctctgccataattgattttgtcaacttaggactcgcaccatcagttgatacactgatagttagcttgtcgcggtgtagtgcacttggaaatacaacattgccatttgatgcatctccaacattattaaaaagggcatgctcaggtaaggcttgttttaccgcttcattgacacgtggctcattggttgctgcaataactagatacgcgtctacaatatcgcttggttcaaattctttttctttccatatgacgacaccgttatctaccatattttgaagtttttcagtgattgtcggactgatgaccgtcatatgttcaacgtattgatttaatgtttgtgcccgacgacttgcaacgacgcctccaccaactatgacgacatttttatttgttaaatctatcattaatggcatattcatgttgagcaacatcctttatatctttttacatcattacaccttaaaatatttaacaccaatcgctaataaacatcacgttgatagcgttgttgttgtttcatttgtcgcaataataactctgcttcttcttgagaaatatgacgttcttttaccaatacatctttaatggcttgatggacatctttcgccatacatttttcatcgccacaaatatagattgctgcgccttgctcaatccattcattgaaacgtttactttcttccattatacgatgctgtacatattctttgtgttcttggtctcttgaaaatgctaaatctacgcgtgttaagtttccattttcaagccattcttctatttcttcttcatataaaaagtcagaactacggtgttgatcaccaaagaacaaccatgtttttccagtcataccaagttcttcacgttcttgtaaatatgctctaaaaggagcaattccagtacctggtccaatcataataaccggtatatcttgcttcatcggaaatttgaagttcggatttttcttcaaataaattggtactatatcgcctggtttaattcgctcagcaaaatgaaccgagcatacaccttttctctcacgtccatgtgcttgaaaacgaaccgtaccaacggtaatatgcacttcatctggcgttgccataaaactactagaaatcgaatactctcttggtggtaattttctaaggatttgatacatattctcaggttgtaattctatagttggaaaatctgttattaaatctataaagtcccgatttataacatattcacgcgcccatgactcatcttgaatacgttcagataattcttcattgtcaaaatagatatctgcatttttcaataatggcaatgttaatttagtaaattcaaaatgtgatgttagtgcttcaacaataggaactgtatcaccatgatcattaattggcaccggagattgcggatcccaacctaacatggatattagtttttcaaccaattcagggtcgttttgcggtaatgctactatacaatctcctggttcatatgattcactaaaatcatcaagtaaaaattctatatgtcgtgtttctttatttgaatcggtaccatttaaattgatattcgctaatacttctgcttggtatggatttgatttagaatatttcttttctttggcagacttaattgattcacttatcaccgattcactttgaataccttctgatgtggtatcaataatattaatgatgtctgccatccacttttctgcgtcttcttcataatcaatatcacaatctacacgcttacatatacgctcagcgcctagattttctagtaaaacatctacatctttaccggcttgacagaaaaattcatatgtttgatcacctaaagctagtactgaatatctcacatgatttaaattaggtgcgttatcatcttctaaaaattcaaagaaatcccatgcattatcaggcggttctccttcaccatgagtagacgtaataataaataaatcttctaactgcgcgatgtttgtcgtatcatattcatccattgacatcaaaacaacttgatgtccgatatcacttaaacgttctgaaaaaatttcagctaaacgcatggcattacctgattcagaaccatatagcactgtaacatgccgctgattagcttcgatatgtggctctttattttgtaacatatacgttgttgaagttgcttgttcttctgatatttgtgattgttgccacacttctgtctctaattgttgttgattactatcacttgtcgtatcgttactattagctagtaaaaaaccactaagccactgttgttggctctctgttaatgtttgcagcagattgttaatctctgtgacttgtttttctgtaaatggactattagatgtatttaatttcaaatgttttcacctcaataaacttgaaatagatgattgactctttttttatcgatagtttagtcaattttttaatatgtatggtataaattaaaacaaacttgagttgtgtctgatagttatacttgcaaatatttacaaccttcatgttgcttgaatgacattatcagtaattcagacaaaactttgattatgtcgtgtcagttattaatgcatacagtaatgcatcgttgttattttttatttatttactatttattatgtaccaaatcagcctttcagtaaaataggtcaaattactgattttctaaatataaaatgcctcctaataacatactattagtacatcattaagaggctcttgtgttatttgcatactaagcgctcaaatttaaatttaagatgaagattctcgcaataatatttctatatttgtcgatatatccaatggatcttccattggcaagaatcgatttacaacatttccttgtcgatcgattataaattttgtgaaattccattttattggggacccaaagattcctggttgttcattctttaaatgcgtaaataacggatgttcatcgttcccgttcacagatattttagctaacactggaaatgttacaccaaatttctcacgactaattttcaagatttcttcattagaacctggttgtcgattgtcaaaattattattcggaaaactcaacactacaaacccacgatccttatatttttgaaataaagtctctagttttttcaattgttcgctatatatacattctgttgcagtattaacaactaaaatcactttacctctaaatgcttctaatttataagttaagcctttataatcacttacttcgatatcatacacatttctattattcataagacacccctacacagccttttttatattgaatatgttctttttagaatgttctgataaaataagtgcgcgtttacaccgtgaacacacattatatagcgtgatacatttttcgagcacacgataaataatgttcgagtttatgttgttgctcaacctatccgatttaccgtcttttttcacctgtcttactttattaaaataatcacattgtatagctgtattagtccagctacaatatcttccgttataacccctcattataatcatccttattttctatttttaaaaagacaattagaccgctctttaaactatagattaatacttaagttaaactcatacatactgataccatacgttagatctaacaatttaaaattcgttataactatggattaaagagctgcccaactcatataatccttaaaaacttcacatgtgattgtttattaagccctcctttatcttattaaatatccttataacccttttaaaattaaactgacacactcatacattgttacacgcgacgataaacgtcatattattgcatatcattaaaacaagtcactttgtatcgtgtgcgaccgaatacatattaaatcatcaataatgattattcaattattaaaaataaaaacgaacattctatatagagtttctacttattgttttttcatcattgtctacattacttaacattcgtgtttataagtaatattgaccgccaatatttagacactttataagtatgccattcatcatttttaatcatattatttttcttattgatatttctattcatatatttctgattgtatatttagatataataatttgttattggaaaatatatgaaacaaatttgactcatctttttcaatatctaaatgacacgatgcatgatttttgaattttgtaattaacttccttttaaattagactgaattatgacaattttcaaacattttaatgtgtaaatcattggcaaaatatacgaattgcatttaaatcgtcaatttacatatatttttgcgtagtaatcaatcgttatcattgttatttatcgttacattatttcgagtatcagtatgtatttcgggcttcgtttgataacgacatttctttgtgacatcgcttcatcagtgtaacaacaaatacaatgatttcgtgatgttagttacccattttatgtgttgcataaaatatgttgttataaaacattttaaatcattttatataaacaatctatatatttttggcatttccaaaatatcacttgttatattaaaaaccgacaagacattttatcttatcggttgaaatttgttattgttatttgtaatgtttttaggtttctttttaatataatatatttcagtgaaaatacatgattgattgtgatttcactgaaacatggttaattgcgttgttgatgaataactttagcataaatataggaagttattttgtacatcgccatatatagaaacgaaattataatgacagctagtacgtaacttgttaaaaatatatgatggttattaatacctatcatatttagtaacgtatatacaatgttactagaaattaatgtgtgaatcagtgctactgttattggtattgcgaacaagaaagtcatttgatttcgtgttatctttgctattcttccattatctaaaccaagttttttcataatgtcataattgtgctgatttgcataggcttctgaaacttgtttatagtacatcattagaaatattccaatgacaagtacaattgatactacgccacctacaaatattagtccacctgtcaaacaatcccaaaccattagcatttctgatttagaatttattgacgcatcgtattttttcgatagcttttgtatttgtgatgttgttaatttcgtctttccaaatacattaaagtttatcgatattgtcgaattcttttgttcatgtgcataaaatccttttactttttgtaattgattgttatctttaacaattaaaaccatactatcttgaatcatcatcaaatttaacgcatgtgcgtcaagttgtttcactttaaagacttcattattaagaccgaccttagactgctttttaaaaataggtacattcgtaatcatacctatactttgattgtctaagtgtaatttgttttggtgatatcgattataatcttgtgcagtaaaagctgtaatcattactgattgtcttgaaaatatcgcgccttcattaccaatgaagtctattggaatatcatcactagcctgttttaacttgtaataagcacgattcttttctaaagaagctctaaataatgtcgtttcatatactttgaagtcttttgcattaaccgaaccctgtatatcacgtttaatattctcaattgtttgttgacgttctatttgtgacttagaattgtcgctaaatgacaaatcataatcattcgtaatcaatttcgtaatggtatgattcatatcacgataggttgttaatgtcattgtgagcgttacaatcaaaaatgtacacagcaaagtgattgttgcaagactgactgcattcattttaagacgtacacgcatcccaactaccacaaaaaaataccgtggatgatagtaaacttttgatacctgctgcaatatactaataattatttcacttatacctacaaaaaatgcataagtaccgataataactaatcctatgacaatccatattttaaaaaaggcaccaaacgtcgtatcttgttgtaatgcaataaagtagcctaaatatagtgctgcgcttcctataacaattaaaacgtaacgcaaccatcgtgatatgacactagaatcggaacgatgttgataagttatcggccgttgaaaattaatactgaacaagttgaatataagtagcatgcccattaatacagcaatgataatcaaagtaataaacatcgctacaaagtcaaatggataataccttaacgtcgcaacttcactgcccattattttctgtataaacaagaaaaatatcgcaccaagtaagtatccgccggcaatactaacgactgaaattattataaattgtaagatagtttccattactacaattaaacgcatacttttcttggtcatgcccaatgtcataaaaatgctaaactcttttcgtctttgtgacatcataaagtgatttgcatagaaaataaaaataaaagttaaaagcgccataaaaaaattagctatgataataaatggtactaggaagtcattcttctgttttatgtagctatttaacccaattgacacaagcgtatattcaatcatgaatagtacacttaccgctaaaatgaatggaatgattacaagtcgctgcgtaataaattgacgtcgcactatgtgccataacaatcttaacttcatatattgacacttcctccattcacaagtgctaagctatctgttattcgttgttgaaaagctaattgactttcttcgccacgatatatttcatgatatagacgcccatctttaataaaaattactcgctctgcataagacgcatcgatatttgaatgagttaccattaaaattgtctgttccaattgatgaatctcttgaaataacatcatcaatgcctttgatgtttttgaatcaagtgcacctgtaggttcatcggctagtaaaatcgtcggtttagtaactaatgcacgtgcaatggcaatgcgttgcttctgaccccccgagatttcagaaggatacttgtttaagaatccctctaaatgtaattgtactgccaactgatgtaccctttgttctatatcttttcgtttagcaccagctaaaattaatggcatcattatattttctttattcgtcattgttggtaaaagattaaaatcttgaaaaacaaaacctaccatttgttgacgatacagtgctttacttttatttttcatattatttaaatgtgcgccatccacaataatgtcaccttcagttagtccatcaaaagaagcaattaaatttagtagtgtagacttccctgacccagactcacccataattgcaacaaattcaccagctccaactgataaattcatttgattaagtgctgtcgtagcattcaaacctttaccataaaccttttttacatgtttcacttctagcaacatggcatgcacctcatttctttgttagtatctatattaaaacaaaaaaatactaataacatttaaattagtaaaaaaatgttactagtatacttacaatattgaaagtttttattcatctggaaattgaatcgtaaatgttgtaccctcattttgtttagatacgactgaaacaggatggtttgtgtgtgttgaaatttgttttacgataaataaaccaatcccacttgagttactttggcgctggccattataacctgaatagcccttatcaaatattttaggcaagtccgcttcactaataccgataccattatcttttacgtataattgattggattgctcatcaaattcaatccatatatctttacctctcgcatacttaagtgcattatttattaattgttctatcattaaagaggtccatctaacgtcagttaatacttcgtgatgacaaggttcataatggatttttgttttttgatcaataaactgtattgaatatttcataataattgggcgaatgatattattaatcgaaattttagtgacagaaatatcagaagtttcatttaataactttaaataactaagtgctaaacttgtatagttatcaatttgaataacctcttgacgaacacgattcacaacattaggctcatctctttcaagtaacagttgtgctgcagtaatgggtgttttcatttgatgtacccatgttaaaaagtagctctctacatcatttttatattcaatttgttcatttttaagctgatacaacgcattttctaagttttcaatttgttgttgttggcttatagtttttacaaaacttaaatatttaatacctatgaatatgagtaataataataaaataacgccaagtgctagtaaatatgcttctaatggcaaatgatacaggtaaaacattaagccaaataaagcaaaaataactatgactattgctatttcctgagtaatacttttaagaaaggtcattacattcaccctatactttatatccgacatttttctttgtaatgataaaatcattaacgccaatagtatttaattttttacgcaggcgcgtcatgttaacagctaatgtgttatcatctatgaagttttctgattcccaacatttttcaattaaagcagttctacttacatatttatcttcattttgaaataataactttaatatttgtaattcagtcaaagatagctgtatgctttgttcttgatacacgacttttgcttcatctaatattaatgtacaacctttaaccgtcaatgaatcattagctactgacaagtcataagttcgtctcaataatgcttgaattttggcaatcgttaatgacaagttaaatggtttttcgataaaatcatctccccccatttgtattgccataatttggtccatattatcaatacgggaactaataaatataattggcacattagatgtttttcggatttcttgacaccaatgaaaaccatttaacgttggcaaattaatatctagcaatacaagctgaggttgatgttggttaaagatagacagtatatcatcaaattgttcaacgacaataacaccgtaattccattttttaagttcagatgctaaactttctgctataacaaaatcatcttcaacaattaatattttcatctataatcttcttccttcaattgaattatcctttgttatctttttgttctttagcctgctgcaatgacggctcttgatttgaactttccgtgtcatttgtattttgatttagtgtatttgctttttctttctcgagttgctttttcttcgtacgtttacgctcttctaaaatagacaacactataaagaatatgattaataatggagataacattactagtatcatttttccacctcaaattatatttaattctatattttcacacgcttctattctaacgctttctataacaaattgtcatatatattcattttttgttattctaaatcactctgtttacatatttttaactaaaactacataattgctcaaaattcctcttttacactgaagacatagtcatatactcaggaggatgtcttatgttatcagttaaaaaagccacaaaatttgcagttactaaccttattatcgtgtcaacagttttcagttctgtcacacctgcaattgcgcaatccgataaaagttctaaagatgaaagtttcgcggttggtaatactaaaaatccaaaaaatgttatctttttagttggcgatggcatgggtccatcatttaacacagcttatcgttattataaaaatgattcgcataccaaagaaatgacccctactgcttttgattcatatttaaaaggcacaaatcgtacatattcaaatgacccaaaacagaatattactgattctgcagctggcggaacagcctttagttctggccataagacatataatggtgccatcggtgttgacagtaacaagcagaaagtaaagacagtgcttgaacgtgcaaaagaaaaaggtaagtcgactggtcttgtttcaacagctgaattaacagatgcaacaccagcagcatatgctgcacacgtgacttctagagatgataaaaacgaaatcgctaaacaattttataaagataaaatcaacggaaagcataaagttgatgttttattaggcggtggcgctaaatatttcggtaaaagtaatggcaatttagataaaaaattcaaaaaagatggttacgaccttgccacgaacagtaaggagttatcaaaatctgataaagataaagttcttggtttgtttgcagataaaaatatgccacttgcaatagatgcttctaaagacgaaccatcattagctgatatgcaacaaagtgcacttagtaagcttgagcgtaataaaaaaggtttctttttaatggtcgaaggtgcttctatagataaatcagcgcattccaacgatattacaggcgttatgtctgaaatggaaggttttgaaaaagcattcgatgacgccattcaatatgctaagaaacataaagatacacttgtcgttgcaacagcagatcactctactggtggtctaacaattggtaaagataaaggatacgaatggaatcctcaatcgattaaatctatgaaacactctggatcatatatgacagaaaaaattgctaaaggtgaagaccctgaaaaagttattaatgaaggttatggatttgaattttcacaagatgatatgaaaaaggttaaaaaagagaataaaaagctaaaaagactacttaaaaaagaaaaagacgaaaaatccgcagaagtagaaacgcaaacaaaagccctacaacacgctattcagaagccagtaaatgataaatcttatacagggtggacttccgatggacatacaggcgaggatgttaatacctacgcttacggacctagatcagaatcatttagtggtaatatcgaaaatacagaaagcgcaaaaataatatttgatatattcaagtaaagcataaaaaaatcccgagcactataacaaggtgttcgggaattttttatggtttaatttagtactcaatgttaggtgcttggttaacacgttcttggtattttttaaatgcgaagtataaaccgccaactaatgttaaaataactgctaattttttcatcattcaaactcctttctaagatgtgttgaaactgagttcaattaaattatatgtttttattatacactttttgacatattttttaaatttaagaatgcgaagatttttaacatttctgatgctagctttctttttcatctttcaaatgcttaataaaatcaaagccaggtcgccctttagccaatgcttccatcacatcataccaatccgaaccgacttgttgatatatattttgcaataattcatcttgcgccttgttcaattcagcaatgagttgatcgcctttatccgtcgaatataattttttgacacgtcgatcagtctctaaaactttttcaataatgagaccttgctcttttaatttttgaagtgttgcatgtgatccttgtttagaaatttctaatatttctagtaatgatttaatagtaataccaggtaatttattgataaaaaacaaaaaacgatgatgctgacgactcataccatacttctctataatttcatcagcggtagtaataaaggttttatatgcaaaataaaacaacatatgctcataatcgtttttattggtcgacatgatgatgactcctttcaaagcgttaacctcattataataaaatttataatgtaagtcatacaaatgatgataaaactataagctaaatctaagtttcacgagaaacatttttgtgtatcagcaaattgcgccaatcatattaatacaaatttaatttaaacacttagaaatgttagtcgtgcgtaaatagtttgtatctctcactctgtgtatttaatgcaaccacatattttccaggaaataattaatcattcaccatccatgttatagcaagcttaatcgcttggtcccaatatgcataatcatgatctcctggtccatcttcaaattgataaggaacatttttgcgtgataaataatcgataaaatctaagttgtcttgatataaaaagtcttgtttaccacacataatgagcaattttggaatttgtttatcttcagctacagctttgtctagcaagtaatacggatcatgttcagttcctttaacacttgaaagattgccaattatggcctcttttgaaaaatcattccactctagatccattaaattttgcgcttcaaacacagcagataatggtacagctttggcaaatttatccccttgtgttaatgcaaatttaattgtgccatatcctcccatagagtgacctgctataaaattgtcatcacgctttttggaaagtggaaaaatttgatgaacataatcatacacttccaaaatataatcataatagctatgaccatatgccatgttagcatatgcgctatgatccacattgggcataatcacagctaatttgtgttcattcgcatacctttctatgcttgtatatctcatatatgtcgtttcatcacttgataatccatgtaacaacattaaagtttttaatggtttagcagttgtatcgttattaaagaagctttgatcttccggtaaaatgactgtcaaattttgatgcataccaattgttggtgaatgatagtttaatgaaatataagccatacgtcatgacccctttctaattctactttatcaacattttacgcttaaacaattcactttaaaatcattttcaacaaaaaaaccgaatacaaatgtattcggcctaaaaaagtatttacgctttttctttatgatcttgcttgcgttttctaaacaatagtaatgatcctaataatgccatcattgcaccaaataaagttgcatttgtgttttcgctcttatctcctgtttctggtaaagcatcagttttgtgttgttttgataccttattagaatggtttacttcacctttaggatttgatggtgctttctgttcattatttggtggtgtaactcttgaatcggagtcgctatctgagtccgaatcgctatctgaatctgagtcactgtctgattctgaatcgctgtctgaatctgaatcactgtctgagtctgaatcgctatctgagtctgagtcgctgtctgagtctgaatcgctgtctgagtctgaatcgctatctgaatctgagtcgctgtctgagtctgaatcgctatctgagtctgagtcgctgtctgagtctgagtcgctatctgagtctgagtcgctgtctgagtctgagtcgctatctgagtctgaatcgctgtctgagtctgaatcgctgtctgagtctgaatcgctgtctgagtctgaatcgctatctgaatctgagtcgctgtctgagtctgagtcgctatctgagtctgagtcgctgtctgattctgagtcgctatctgaatctgagtcgctgtctgagtctgaatcgctatctgaatctgagtcgctgtctgagtctgagtcgctatctgaatctgagtcgctgtctgaatctgaatcgctgtctgagtctgaatcgctatctgagtctgaatcgctatctgagtctgaatcactgtctgagtccgagtcactgtctgaatctgactcactatctgattctgaatcgctatctgagtctgagtcgctgtctgaatccgaatcgctatctgaacctgagtcgctgtctgagtctgaatcgctgtctgaatccgaatcactgtctgattctgagtcactgtctgaatccgaatccggatccgggtctgggcttggttctggatctggcgttggttccggatccgggtctgggcttggttctggatctggcgttggttccggttctgggtctggacttggttctggatctggcgttggttctggttctgggtctggacttggttctgggtcaaccggcggccctggagttgggtctttcggatttactgctgaatcaccatcagcacttccaccaccataacgtacaacattctcattattccaaccgaaaatactgtagtctttacctgtcgctgggtcaatattttcttgaataacctgtgttttcaagtttttaccagtattatcatagtgaccttccactaatacaacatacgttttagtaatatcgccaaaattaatacttgctacattttggtatttataagtgattttatccttaaattcattcgttacttctttaaggttagagtcatttgggtccgcatagtagctatctgataatttagatgtatcattcacttcaaaaattctcagttttgtatctgtagcacttactttaccgctactttcttcgattttatcttggtaacctttaatatacacccacgtattacctaaaactcgttgcttagggttaacaaatactgtttgcttgtatgtgttttgacctgaagctgtatctacaccaataatttgagaagaaatatttgcgccatttggtttatcaattcctgcaataggcgaactatagttataagtaattttattatcaaacatttcatccgcaatattaatatttgcatcgtatgttcctgatttaggtgcctttgctctgtctgtaaataaaggtaatgaaaattgtccgttaatattttctttttcatttacataatctgtaaagacaaatgtatatgtcttagtcaagatatcatatgttgctttagctacaacatcaccattcgtgcttttaatatctgcaattggcatcgtattattcgaattagagtaatccacgtctccattaccagttacactatctggtaacttcgctgtaaaataatcccctgatttcacttgtccagtcactgtaaagtttgccgccataaaagtattaccactttggttagggtcaaatgtagtcttttctaattgaaaatcttttgccgtaactttatcatttacatttgtacctttagcatcagcagcatttactacaggttcagcaactgcaagactacgtacagctctcgttctaacacttggtttactagttccttgcgcattggaaattgtttgtggtgatgattgtggtaaatctaatgtttgaggatttttaagctcactgtttgtcgctatgctattagcatcattcgttgttttattatctacttgagaatttgcttcttgaggaacagtttgatcttgcatttttgcagcagttgcttgatctttaattgccgtcagttgaggtgtttcatttgttgaagctggctctgttgtagtggtattgctcgtttgtgtagacattggttttgctgtgctatctacattcgcactgtttgtgtttgcactaatatcagatgtatcattagccgttgtatttaattgaggtgtttctatcatattgtttttttcggaatctgcacttgcattatttttcgaagattgcgttgtatcgttcgattgttctgaagcttgtgcttgatgattgcctatcccaaatagtatagttgcccctactattactgatgtggtacctactgtaaaacgtctaatcgaatacttattctgcttattcgacaaataatcaattctttttttcaaaaatattactccatttcaatttctagattagtctaaattgtataatgaaataagaattatatcaattgcttttcgaaaaaaattacgtaaaatttgttttcttcctatttatataacttaaaattttctgttaactagcaaaaatcaatataccatttttacactattgcaaatgttttacttttcaaaaacttagaagttctaaatttttcatcaccttaaattttactgtaatttcaacaatcaaatttaactaacattttaaattattcatcatgctagcaaaaaaggcctaacgtataaatgtacgttagacctcatgttcaacttattcattttacattgtatattaaacacatacatcattgaataaatgtttgcttactaaccaatttttatgatctttaacaacaagtttttcatctttaagttcatgaataatatgaccagctgtttcccgggaaatcccagccatatcactcatgagttgaatagttaaaaactgtttgatttcataaaattcatcttgatcgtaccctactgtctgacatagatgacataacaatttaataattcgatctttagcaaatttacttgttaatgccatgttatagttcatgtgttgctgctcattatcatttattaatgcaaaaagtgtcaaaaatatatcatcattagctttgcacaaaaaggccatcaattctctaggcaatccaagaactgtacaatcggttaatgctgtacacaattcgttaacctctttcggatgaaataagttactgattggaaataatacttgctctttattaaaataacgatatacatctccattttgattgtaatgttctctaataatgttaccttcaattaaaaagtaaatattgctactttcttgtggcgaaaaataaataacttggcctttcgtataatgtctgacaaaacattcactttgatatggttgtaatatactatatgggatattaatgtaatctgctaatgcctttagttcatgttctaatttattatttctacccaaaataaagttttctgtcataagttaaactccttcaaaccttgcaaagtgtcagcagacaactttttcatttgaatcaacggagaaacatatttaatgttttgtcgcgtgataaagtgctacatgtgaatgtgtgtacctttattaccaatcaaagcttcgtatgcctgctctaaattggtaatgataacttttttgttttccccactttcaacaaatcgtatcgcagcttctatttttggcaacatcgatccttccgcaaacttaccttgtgccgcgtattttttcagtgttgctacatcaatatcatcgatttgttgttgattaggttcattaaagttaataaatacattttctacattcgtaagaatcattaaggtatctgcttcaatcagcgttgctaatttctcactagcaaaatctttatctataaccgcttcaacaccttcataggtattttctttttttataactggaataccgccaccaccgcatgcaatgacaatatttttaccgtctgctaaagttcgaattaactggtgttctagtatagattgaggtagtggtgacgcaactacttttctataaccacgtcctgcatcttctttaaagactgagtctggctgttctttttgtaattcttcaacttcttctttcgtataaaaaggaccaattggtttggttgggttattgaatcgtggatcatctttatctacttccacacgtgtaacgattgtgcctacagttctatcactattcatttcagttaaaatgcgattgatttcagtttccaaccaatagcctatcataccctgtgacattgcaccacaagtatccaatggcattgccggcgttgtgtcactgttcgatttagcttgttggattaataaacttccaatttgtgggccattaccatgtgaaatgacaatacgcgctggtgaatcaaataaaggtttaaggttttgcatcgcacgtctaatagctgtttgttgtgcttcagctgttgcttcttttgtctgtatcgcattaccgcctaatgcaatgacaattttctctttcatatttttgtcgctccttttaaaaaacatttatcgttcccatcaataacttaattaatccgataactgcaagtacgataataatcataaaaagaatatagtctgatttaatcaaacgtgtctgattattcttttgaacgattgaataaacaagaagagctggaatataaagtaacatcgtcaataataagtaattgatacctgctgcatatataagccatatagcataaattgaggctatgatgccaatcgtccattgcttagtagttgcttgctgtcgatgctctaaagtgtatttaacttggtaaaatgcactgaacatgtaagggtataaaatagcacttgatgctagtgaaaatgcaaattgatacgcactctgtgtaaatagcatacttattaaaaataattgtactaatatattggtaataagcagtgcatttacaggtgctccatttttattttctttagcaaaccactttggaaataatccatcttttgcaacaatgaaaggtaattcaccagcaagcaatgtccatcctaaccatgcacctagtaccgaaataattaaaccaatatttacaagtgtagatccccaaccacctacaatagttgcaagcacctgtgccatacttggcgaatctaattgagaaatatgattttgcaaaatcacgccttgagctaatacagttaataagaaatagataattaaaactgatataagtcctataaccgtggcactacctacatcttttttatttttagctctactagaaaaaattactgcaccctcgataccgataaacacccaaactgtcactagcatcgtacttttaacttggctcattgtgctcgcccaactaaatggcaatacaccctctgacgtcataccgaaaaagcctgttttaaaagtgtcaaaattgaatgcaattatcatgcatatgattacaagtaaaatcggtattaactttgcaacagtaacaatactattgataaatgctgctgtttcaacgccttttaaaatcaagaaatggacaccccagagtagtaacgaggcgacaataatacttggtaatgtgttgcctcctttaaaaatcgggaaaaagttacctactgctgacatcaatagtgttgcataggcaacattgcctaaaaacgctgagaaccaatatccccaagcactgataaatcctacaaaatcgccaaatcctgcttgagcataactataaataccaccgtctagctccggccgttcattggttaaattttgaaatacgaacgctaatgaaatcattcctatagctgtaataatccaaccaataataatggctaatccaccggctttaccgcccatatcagacattatattgaacgcaccgccaccaatcatggatcctataactagtccaattaaagaagatttactgagtttgttatctcctgattcgttcatattcatttctcctttaataccaatatgaggtgtctgtacatgacacttatatcatcagacacatcatattcatatcgttccatttagtgattaactccccaatgttgctgccattactgccttaattgtatgcattctattttcagcttgatcaaacacttttgaatgttcacttctaaagatttggtctgtaacttccatttcagctaatccatatttttcataaatttcttgtccataaagtgtatttgtatcatggaatgctggtaaacaatgtaagaatatcgttgaatctttacctgttaaatcaaacatctgttgattcacttgatagtcttttaataaattaatacgttgttcaaattcactttcttcacccatcgatacccaaacatctgtatatatagcatctgtattttcaactgcttctgcaatattatccgtaatcatgactgaaccaccatattgactcgctttttcttttgcaatatcaacatatgcctcttttggatttaatgatttaggtgtacaaattcttacattaacacctaacatagcacctgctaccattaatgaatgcgcaatattattacgtccatctccaacgtaagttaagtttattccttctagatatccaaaattctcttttattgtcataaaatcagctaacatttgcgtaggatgccaatcgtctgttaatccattccacaccggcacaccagagaacttcgctaaatcttcaacagcttgttgtgaaaaaccacggaattcaataccatcgaacattctacctaatactttcgcagtatcctctacagattcttttttgcctaattgaatatcatttttccctaaaaattctggatgcgcacctaaatcaatagacgcaactgtaaacgctgcacgcgttctcgtcgaattcttttcgaatagtagtgcaatattttttccagataagtagtgatgcttaataccgtttttcttatactcttttaatgtaattgcaaaatcaataagtccttcgaattctgctttggtaaaatcactttcttttaataatgatctgccttttaaatcatacggtttttgaatttctgtcattattttcaccctcgcttctataatttattacgttaaatgtcttctctgaatagtggttgactcatacatctagggcccccacgtccacgtaccagctcgctaccagatatttcaatgacttttatgcctttttgtctcaataaatcattcgatacatagtttctatcgtaagtcactacaacgcctggtcttatacataatgtatttgagccatcattccattgctctctagcaccatcaatgacatcaccatttcctgttggaatgaattggatatcatctatacctagtacgtcttctaaagtatcttttaaatgactagattgtttgatggcaatatctttatttacgtcatcatattcaataataaatatattcatattgccttctgcctttaaaatggctgaatgcattgtaaatttgtcataatctatcattgtaaatactgtatctaagtgcataaaagttcgactagttggaatttcaattgctactacttttttaaacgtcgcctgcggattttcaaaaatacgtcgcgctaacttttcaatagcttgtgcagatgtacgttctgaaacgcctatagccaagacatctttagataaaacaagttcatcgccgccttcaatattgaatgggcaatctcgatctaaccagattggaatattcgcatctttaaatctaggatgatgctttacaatatattgaataaatattgattctcgtcgtcgtgctctccagaacatccgattgattgttataccgtgtcctattgaggcttgtggatctctagtaaaataaaggtttggcattggatctaaatagaatggatacttatcatccatatactctactagatgtgtacatttcggattaatttcttccttacgtacccctgacattattttatctacaagttcttgattagaaagtgtcgcaaataatgccttaatttcttcttcatgacctaatattgtttttttagactctgctaatacatcatcaataaattcacttcttacttgaggattttcaatactttcagctgctaacttctcaaggtaaagtacttcaacaccctcttctcttagcacctgcgcaaaatggtcatgctctttttgagctacttctaaatatggaatatcatcaaatagtaatccatctaaataatcaggtactaaattttctaattcttttccaggacgcttaagtaacacagtttttaaagctccaatttcgctatttactttaattggaccatctgtcatgtctatttcctccttttatctttgaattcatttagagtatagacaatcttcaaacgcttacatgtgattatattcacataaagaaagtcgaaaatttcatatctttttgttatacaatacataataatggatttttatacataaacaaaggtattttgggtcaaaatatacattttttattcaaaaatacccataaaaacatgttgtataaagttttttatacagtcaattgaatgactatgaattctttctttccataaaaaaacgcgtacacaagttaatatttggtaactaacttgagtacacgtgatacgaaacaaatttttattattcatttgatacatgtctatttaaataattttgcatatacgtattctgccatatcatttgaggcagttaagattaatgtagtgtcatttccactcaccgtacctaatatctcttctatatttagctgatcgataaaatagtttatgccttgggcgaaaccaggtgaggttttgacgataatgtatgaaccattgatgattgaacttagaacttcatgttcacaatagtgtctaaacttttctctcatctcttgttctgtttgattattaatagctttataaatccatgtctcacaatcgatagggacacgatatatatttagttccttcaagtctttagcaattgttgttgcactatatcttacaccaaaatattcttcaatatatgaaatgatttgttcttttttataaatcttatgctttttaactattgtagaaacaatttctaatcgtttacttttcttcatattgtaaactcctttggtagttacgtttcttgtattaaaaaataaattcatgcatgtttcatttataatttaacactttgttttgcaaaagataataaaaatacatgtaaattttttgtgacaacttttaaaatgaattttgtattctaagtcagcatttaattatcacatatctactacttgtaatgattttagactgccgagtagtctttcggcagacaaccctcacactcctctcatctaattacaaagagagggtatacctacaaagtcaattatcaatgtaggtataccccatatataagctgtatttaaaatttaattatttataagtgtttaacattacttcttcttgtttatatatttttactccacgcctacttcattccatgcttcatacacctgttcagctgtttgctcgtcatataaatctttggccgcttggtataatgcatctttacaatctttgaagtttgaattacttgttaagtattccgttaatgctcggtagtaaatttgttctgatttagatttccctattgcttgaatcacgttataagctgctttatttggaattccagaattcgtatgtacgccaccattatctttttcagtgaatacatagtctttcatatgagctggttgaccaaattgttctgggtttgacatgctgcgtaaagcgtctccctcttttccaggtgtgtagacatcttcacccattaagaaatcctcgtcatctacaaagtatccaaaaacatctgaaaagctttcatttagagcgcctgactggtccttatattctaagtttgcagtctcttgtgtcacaccgtgtgttaattcgtgtgctactacgtcatttgcacccgataaacttgtgaatgtgcgaccatcaccatcaccatagatcattttgtcaccaatccatgcggcattatttctgttatcttgaccaccgtagttattaacatgcgttaatgaaacaattggactaccttggttgtcatatgattcacgaccaaatgtgtctttgtaataatcatatgtttgtttagcgtaataatttgcatctacgccagcacgttgctcatcttttacgaagttttcatcttcattagtaatcaatgttgcttgacctgtttgatcattaaagctaaatgctgataatttaccttgatgcgttaaatcttctaggctaaatccaccgtcaatactattgatattgatatcttttgtatcgccaagtacaccttttcctttaccagtttctgcagcttctttaactaagttcattttttctaaaatttcgccagtttgagcatcaattttaactttccaatgtgaaatttctggtgtcactgtaattaactcaacattataaacgtatttattactgtcaccatcgatttcaactttgttttctttaatgactttatctttaagatttttcgctttatgcttatcaatcttaactgctttaaatgctttgtcggctgcgtcatctttacttaatgtcactttattcgttggctttactttcttcgcatcagtatccccattgattaaaacgacttttcctgatttgtctgcgtgtactttcacttctttgtcaggtgcatgaacaccatcaacactcggttgcaatgtgtaatgcgtaaatccctttttatcagtttttacatcagtaacagcgtaatcttgataaatattttttacattttcggatttaggtaattcttttaatgctttgaccgcatcactcttttgagtcacctcaaatttaatatcagaattagctggtttattgtttgaatcaatcgctaatgctgctggtgataaagtgctcaacaaggttactgctgccatacttgtaaatgcatatcttgaaaatttcctcacatttcattcctcctgaaatcttaaaaacagcttataaataaaatattaatttaatttttcagaaaagtaaatgattatttctatttatttcgatactttttgttcgttgattttatttattgattcttttcttttttaaaaatgttatctgtaactaaataaaattttaaaaattgagcttaattatattttaaaatttatcaaggctttatttttgtgaaaatattaacaaatacaaaatagtgctctatacacttaatcaatgcttgaaatatgtgagataactatttaaataatcatgatcaaataaacatttttatcaatttcaaacaactatgtaagacgcaataatcgttattatttaataaaaaagactagaatgcggtatctcccctcacactctagccttaatatgccattattttatttacttgttttgtatggtgtatgtccaactgttacttcgacaactctattatgatcaacgacaaaccagatgcctaatgtctttttagcattttgatagtaaaaaataccgctatcagcttcctttgttttaccattttcttttttcaagtccttgccataagctttttggatatcttttaatgaaatattatttttaactacaaattgcaattgacttgcttcgtttccttttgcagaaacacctttaaaagtttgatcatatttctctactttttttatcgtattcgttttagctaatttaataccattgaatttcacattatcatacttaatcgcgttaataaaattcttatccagaataaaattagcattattaccaatataaccattataagtataatatggggttattgctgcctgtgcctgtttacttgttggcgccgaattttcaacaactgttactccaatcagtgtgcccaatgctaatgttgctgctacacaaactttactggttttattcataattatctctcttttccatacaaatattttattccttacacttttattataactttttcagccataaaaatactaatgattatatttataaatacataacagttttgttatactaattgaagtacacaaaaaacaatgaaaatattaatatcgcctacttttctaatatttattttttaaaatgattatggcaatattgaaataaattatttagcttcacgtatcaactacttttcattaacatggaggcgttatatttgaaaaaacttcttattaccatcgtaattatcgtattaatcggagcacttgggttcgcaatttatgctgcaataaatcattctacatcatcaagtaataaccaagaacaagaaaataaagctacgcataaaaagacagaaaccgaagaaaatgatcaacaagatgatagtgcagacaaagcagataaaaatcaaaataatggcaataacgatactaatgacaatcaaccatcttcaccgtcaaatgttcctaacaaccattcaacagcaccatcgaatacgcaaccagctcagccaaaagactcaaattcaaataaaaataatactcacgatggtggtagtcaatcgtcaacaaacaaccaaaataatcaacaacagaacacaccacctgctaataaatcaaataataccaatacgtcttctaaacaaacacctcaagcacaatcacctaaaaattaatcatttacctgatacgtccacaagtatcaggtacataaattcagaaaaacagcagtgagatatttttctatttgaaatatcttactgctgttctttatttgcataattcgcactctgttaaattcatataaaagttcgctttaatgtcattgacgtatgtataagctctcatgtttaataatattaatacacctttaaaaacgcttacacgaaaattttagaaaggaggtacatgttaaatgcttgatagacacttaaaactactccagttttttattaaaaatccatcaaagcacattagttctaatgaaattgctgaacatgtcaatgtttcaaaccgcacagttcgcaatgatatccatgttatcaatagcaattttatggatgatatcatcgtaagtattaaatctaaaggatatcaattaaatacatcgcagtataccttagaaacgataactgaacgttacacgcatattcaatcatataaagaaaaactattattatctatggcgtatcaactgctaatgcacaataaatcgcagacattgcaacaactagagcaagattatctattatctaaaactgtgctcaacgactatttcgttcgaattcaacaatggtgtcaaaaatttaatatcgctttaacaatcaagaaaaaacaaggtattgtggtcgatggaacagataatgatatcactaatgccatcatccatttaaatcaattatcatcagggcatgtacatgttgaagacctaattttaaatgaattacctgattcacaccaaaggatgatttcgcatattatacaagagacacttcaacaacatagtattgaaacaactgatattcaaatacaacagcttttaattcatctcattttaatcattaaacgtaagcaatctttaagtgagctagacacgttaaaccatgatgcaaaattgatatctcaatcttgcattaagcaaatcaacgaaagattaggttatgacttgaacgaaaaagtaatcaatatgttttcattctttattgcttatcattttaataaactcgatattggcatagaacgtatatttatacaaagttatattgatcgcttaatcgaattgatgcagcaacgtattcatgtacctttcaatgaagattcgattttacaacaaaatttatataatcattttagtaaagcatatttacgtatcactcaaaacatttatttaaacaatcctttagttatagagattaaaaaactctatccctttgtgtttaacacactttttgaagcgattgataaattagcaattgatactgatatagagatgagcgaagatgaaattgcatttttaacaattcattttcaagctgccatcgagcgtcgtaccaaaacacaattaaatgtagtcattgcttgttattatggtctaggtgtgtcgaattttttagaaactaaaataaataacttatccgaagagttgtcagtgataaatacgattaaactagaaaatataacacactatcactttgacaatgtagatttattaataacgacccatgatattccaaaacaaacgctaaacatacttcctaagcacctgacgactatcaaggttgcaccattattttctgaagatgatcgtcacaaaatcagacacgttgtgaagcaaaagcaaaatccggttcaagcacatcatcatatggacactgtcaatttccttgtcgtaaatactgaacaaaaatcacggcatactgtgcaaatttttgaagaagctcaaaaaatattacaagcacatcatgcgattgtagaaggatatatcgaatcagctttagagcgtgagaaatcatcttctacatacataggtaattttatggcgattcctcatggagatcctgaaaaagttttacaatcacatgtgcttatttttcgcacaaaagatgtttttccttggcgacaacacgatgtcaaacttgtctttttcttagcgatttcgcataaagacaaagcttttacaaaacaaatgatgcaattaattgctaacttggatgatgattcagtgaaccatttatgtagtttagatgatcatagtttaaagcaacagttatttgaatacttacaagaataattgccactagtaacggtaattattctttttttagtatcgagaatacgcttacaatatagaaaaggagatgattttatgaaaattgtagctattacctcatgcccaaatggcattgcacatacatatatggctcaagaaaagcttgagcaggtagcaaaagaaatgggtgtggatattaaagtagagacacagggcggtgttggtgctgaaaatgttttaactacgcaagacatcgaagaagctgacggtgtcataattgcagctgataaacaagttgatctgtcccgatttgttggtaaacggttgattaatgaaaatgttcgcgaagggattcataatccgagaggtctaattcaacgtatcattaatcaagatgcgcctatttatcaatctgaaacaaattatcattcgaaagatcgcggtaagtctaaaagtggtattcaaatggtgtatcaacatttaatgaacggtgtatcgtttatggttccttttatcgtagttggtggactccttatcgccatcgcgctgactctaggcggtgaaacgacatcaaaaggattagtcatcccagatgattcattttggaaatccattgaaaacattggtagtttagcctttaaatttatggttccaatactagctggatatatcgctgttagtatcgctgacaagcccggtcttgttcctggtatgattggcggcgctatcgctgctgacggtagtttttatggcagtgatgcaggcgcaggatttttaggtggtattgttgctggtttcttagcaggttatatcgcaaagtggattaaagatattaaagttccaaaagcaatggcaccaattatgcctatcattattattcccattatttcatcggtcgttgtaggattgatatttatatttttaatcggtgcaccaatttctaatatttttgaggcattaacaacctggttaaaaagtatgcaaggtgctaatattattatacttgcgatgattataggtgcgatgattgccttcgatatgggcggtccagtaaacaaagtagcatttttatttggctcagcacttattgctgaaggtaattacgccgttatgggtatggtcgcagttgctgtatgtacaccaccaatcggtttaggtttagcaacgtttgttcaaaagtataaattcaatcattccgaaagagaaatgggtaaggcttccttcactatgggactatttggtattactgaaggtgctattcctttcgcagcccaagatccattgcgcattatacctgcaaacatcattggtgcaatgattgcatcagtcattgcagccattggtggtgtcggcgatagagtcgcacatggaggtccaatcgtggctgtattaggtggtattgatcatgtattatggtttatctttgcagtgatagtaggtagtcttgtcacaatgactactgtactattattaaaacgcaatacaccagttatagcagtagatgcaccagcgcaacacacgcaacttcatgatacagatattacacaacatgatacagaggttgacaatgtagataacaccgcgaaacattcacatctcaataaaccttctcatgtttttgatcaacaaactatgataattactgatcacgacatgtctcgaaacgaagcaattgatatgttgattcataaacttaaaatttgccgttatgtagaacacacatcgcatttaaaaaatgcaatcctagaacgtgaaatggagtctacgacagctattggcatgaacgtggccattccacatgcaaagtctgatgttgtaaaacaaccgattgtagctgttatgaaaaataatcatggtgttaaatgggagagtctagatggtagtctacctcaattgatattcttaattgccgtaccaaacaacagtcaggatacacatttaaaaatacttcagcgcttatctaaagcgttaatgaatgatgagacacgccaatcactaattaatgcaaacagtactacagaaatttataacttattaatgaaaatatagaggagttttaactatggcattatttttacaacccgtttttaaaaatagaatttggggcggtcatgcattaaaagcatttaactatgatatccctaatgaaacaactggtgaatgctgggcaatttctgcacatccaaatggtcctaatacaattatcaatggtccatacaaggatatgaccctagatcaactttggtcacaacatcgtgaattattcgataatgattcacgagatagtttccctctgctaactaaagtattagatgccaatgataaattatctgttcaagttcatccagatgatgactacgctttaaaacacgaaggcgaactaggtaaaacagaatgttggtatattttagatgcagccccaggtgctgaaattatatatggcgtacatgcacataataaacagacgttaatcgacatgattgataatcatgaatttgacaaccttttcaaacgtatacctgttaagcccggtgacttttattatgtgcctgctggcactgtccatgccattggatcgggtattttaattttagagacacaacaatcatccgatacgacataccgtatttatgactatgatagacgagatcaaaatggtcaattgcgtgatttgcacttagagcaaagtaaagatgtgattgaattaggcaatcatgaaccaaatactactcctataacaactcacatcgacacacacactgtaactcaatttgtagataatcaatattttgcagtatataaatgggatattcatggagatttaaaattcaataaaccacatgcttattgcttagttactattatcgatggtactggtactttaacagtaaacgataagcactatgacatccaaaaaggttctagctttattttaactacggaagacgaggatattcactttgtcggtaatattagtgctatagtaagtcatcctggataatagcaatgataacacccgtcccataaaagacagaaattactatctcttctgtctaaaaacataaaaatccacacattaaggagctataaccctaatgtgtggatttaatttttattctgtaacgttactttggtcaactttttcagatacgcgcttcatcaatggatctgttacaggttttaaaattaaacctacaacgaagaatcctatgccaaataacgttaatataattaattttgtaattaggatttccggaacaataccgcctactgtttcacgtaatgaatcaattgcatacgtaaatggtaagtatggcgaaatgttttggaaaaattgtggcgtagtttgaattgggaatgttcctccaccacctgcaatttgtaatacaagcaatacgattgcaattgctttacctgggttaccaagtaatgatacgcacgtatatacgattgagttgaaaataatcgaacagaaaatcgttataagtacaaataatacaggtgactcaactcctgcttttaggattaacaaatctccaaccgatacaatgagtgcttgcaacataccaagcattataaagaatcctgccttacctaagaacacttgtcttgtcgttaagactgactctagactcttatgtttattatcaaccgttaataaacttaccatcaagagtgcacctacccatactgacagtgcagtatagaatggtgtcatacctgaaccataatccttaactgggaaaacatcaacagtcttcttattaataggatttgcaataatacccgcttgctttttcaaatcattcttaagtgtgtcgattaatttgtcgactgcatcatctttgtctaatttcttgaaaattttattcgcttttttcaaatctttttcaacatcaggcaatttattttgagaaaaatcagctaaatctgataaagcctttttcgcttgtggctgatttttatttagtaatcctaccgcttgatcataaccatttaataacgttggtaaatttttattcacacttgctgtcgcattagttaatcgctgttccaactgtggtaagtcattgcgcacaaagttagcagctttagctacatcacttttcactttcgggaagtttgcttgagcatttttaacagcactaatgtattgttgttcaatacttggtaatactgtttgtaagcgatcaatacgtgttttaccattttttaaaatagcttgtccactgttaatgacttgatcaattgtatttaatttagactgaacattggataatgcagtttgccctttgttcaattcatccataatacgttgtgatattgatactaaagagctgttaagatcttttttaacataatctctaaatgatgataatgatgaatctagttttgaaagttgatctagtaatttagtagcttcagcagttcctgaactaccattctttaatgcattgcttaattgattaactaaccttaatgattcattaattcgattattagctgcttttaccttatcaatttcttttgataaatcaacattttcattcttctcaatctcttttaatgtatcgataaattgttgattatattgcgttgtgtattctaaaccggacttaacattatctaaagactctctaaaatcagaaggcttgtccgatgctaaaatgccatacgaaatattacgtaatgcctgactatctttttgtgcggctttcgcttgggtatctaaattatttgataatgataataaagagcccgttaatgccgcttccattgatttaacatctttatctgtaatgttttgtgtgttctcgttagctgtgctgacttgtgttgttgttatatctgcaaaactttgaccatcttttttcccgcttgtactttgtggtgtagtcgatacaggcgcattattactatttggtgcggtattttgcgtaacattattatttggtgcagtatcgccacttggtggcgttgatgctacaccattaccagctgcaggtgcactatttgatgtttcgttgttcgccgcgctattttgaggaatctgttgctggtttcttcgatttaaatcttgcgcgcgtcgaattgcatcttgataatcaccgactctacttctaacttgtgtgacgaagcctttggcatcatttaactgtccattagcttgatcaataccttgactcgcaatgttaagtccttgattaattttagggaactgcgctggcacgtcatcagctgcaaaatttaacgctttttcaattttcggcatataattatttaaagctaatatcaacttagccttttcattaagttgcggaatagcaccattgacttcgtttaattttttctgagcatctaaaatatcacctttataatttcctagttttctaaaatcattggcatatttatctaaatccgcttggtggttattcaaatatacaattttattcgcaaagtcattaatcttaggtaaagctttatctgctgaatataccgcattttttatcttgttaattgtcggcacattttcttcaatagttaaacctgctttgttagcttcttctaataatgctcgagttactgttttattaaattgttcattcgctttttcaacgacaactgacgaaccagtatctgttagcttagacgcaacagcgttaatcttctgattcaccttaaattctacatctgctttttgaggctgcttacgtagtgtccctgtaatttcatgtgtaaacttagatgggatgtaaatacctgcaaaatatttacccatttttatctcatgatcagctttctctctacttacaaactgccaatcaaaacttttatttttcttgagtgtattaaccatcgtattaccgacattaacttttttccctctgattgtgtcgcctttatcttcattaacgactgcgaccttgatgtgtcccgtgttgccatatggatcccacattgcccataagttaaaccaagcgtagaacgatggcaaaatagctaagcctgctaagataatccacacagctggcgtcttagctactttcttcagatccattttaaataatttaaatgcgttcttcattgtcacactcctatgtaggaattattcatattttttatatattttttgtaaattaatttatttttgcgttgtgaattagtataatcaatttactggaagatatttagtcgattgatacctatcaactattttcagcatacgataaattataacaaatcatagtttattatcacacttaattattatatttttcaagggagaatacgaaatatgcctaaaaataaaattataatttatttgctatcaactacgctcgtattacctactttagtttcacctaccgcttatgctgatacacctcaaaaagatactacagctaagacaacatctcatgattcaaaaaaatctaatgacgatgaaacttctaaggatactacaagtaaagatattgataaagcagacagcaataatacaagtaaccaagacaataacgacaaaaaatttaaaactatagacgacagcacttcagactctaacaatatcattgattttatttataagaatttaccacaaaccaatataaaccaattgctaaccaaaaataaatacgatgataattactcattaacaactttaatccaaaacttattcaatttaaattcggatatttctgattacgaacaacctcgtaatggtgaaaagtcaacaaatgattcgaataaaaacagtgacaatagcatcaaaaatgacactgatacgcaatcatctaaacaagataaagcagacaatcaaaaagcacctaaatcaaacaatacaaaaccaagtacatctaataagcaaccaaattcgccaaagccaacacaacctaatcaatcaaatagtcaaccagcaagtgacgataaagcaaatcaaaaatcttcatcgaaagataatcaatcaatgtcagattcggctttagactctattttggatcaatacagtgaagatgcaaagaaaacacaaaaagattatgcatctcaatctaaaaaagacaaaaatgaaaaatctaatacaaagaatccacagttaccaacacaagatgaattgaaacataaatctaaacctgctcaatcattcaataacgatgttaatcaaaaggatacacgtgcaacatcattattcgaaacagatcctagtatatctaacaatgatgatagcggacaatttaacgttgttgactcaaaagatacacgtcaatttgtcaaatcaattgctaaagatgcacatcgcattggtcaagataacgatatttatgcgtctgtcatgattgcccaagcaatcttagaatctgactcaggtcgtagtgctttagctaagtcaccaaaccataatttattcggtatcaaaggtgcttttgaagggaattctgttccttttaacacattagaagctgatggtaatcaattgtatagtattaatgctggattccgaaaatatccaagcacgaaagaatcactaaaagattactctgaccttattaaaaatggtattgatggcaatcgaacaatttataaaccaacatggaaatcggaagccgattcttataaagatgcaacatcacacttatctaaaacatatgctacagatccaaactatgctaagaaattaaacagtattattaaacactatcaattaactcagtttgacgatgaacgcatgccagatttagataaatatgaacgttctatcaaggattatgatgattcatcagatgaattcaaacctttccgtgaggtatctgatagtatgccatatccacatggtcaatgtacttggtacgtatataaccgtatgaaacaatttggtacatctatctcaggtgatttaggtgatgcacataattggaataatcgagctcaataccgtgattatcaagtaagtcatacaccaaaacgtcatgctgctgttgtatttgaggctggacaatttggtgcagatcaacattacggtcatgtagcatttgttgaaaaagttaacagtgatggttctatcgttatttcagaatccaatgttaaaggattaggtatcatttctcatagaactatcaatgcagctgccgctgaagaattatcatatattacaggtaaataagtattatattaaacccgtaaaatttataagtataaacaaggagttcggacttaaacatatttctgttcataggtccgatttcttattcaattaaacccgaggcattcagttcgaacgcctcgggtcattttatataaatatattattttatgttcaaatgttcctcatcatatccgtttcaattgtcatctcacacattttataaatatgagcaaatgtacttattttcaaacattactgccgaactttaattgacgttatattaactataaactacttttccatgactctacggattcaatgtcacatgagcgtgataaaatttgttcaataataaagtcatgtttatcatctgatctatcaccaacagcatcttctaaaacagtaatataatagtctttatctacactttctaatgccgtgctcaatacagctccactcgtagagacacccgttaatactaaatgattaatatcatttgcacgtaaataaacttccaagtaactacctgtaaatgcgctaaagcgtcgcttagaaataatcggctcatcttctagtggtgctaaatcttcaagtattcgtgtagatgcatctgcttcagtaatcgcatatccttgagctttaattgttgaaaacactttattactcgaggagacatcattaaaatgcttatctaacaccaaacgtatgaaaatgactggtattcgatgttgtcttgctgcttcaattgctctctgattcgctttaataatattttttattctaggtacactactcgctataccttcttgcatatccaaaactaatagcgccgtttttcgagacatcttcattctcctttacttctgtagttctaagtcgttaaattcattataacgttaaaatgatggacaatctattcattgcattttgcatatacttcacaataatttaagggggaaataagacgtcttatatacttaaaaaaatatatagatgctcttcccccaatataattatgctttatttttcaacttattgcgtcgtgataaccaaatcattagtacacccattgcaccaacaattacagatatcggcaaccaatgttcttttatcgtttcccccgctttaggcaaagatacattaccatcagcatttaataatccacttaacaatccattacctttaccaagtgttaacgtcttttctggccttggtgtgggtatatctggaatactgtctaataaatttgatccttgattcattaaatttgccaacttatttaaatccgttgttttcccatttttattcaatcgatctagtaaacttggacgatttactattggtgataaaatatagtctatatcttttttcgtttgattgagtctcttttgtaaattcaataaatcatccgctttaccattcaatgccgatttaactaaattaaaaattttattttgatctgtttctattttagtaattaaatctgccagtaattttgccttttgtctttctatacgtgttgctaaaatcgtttcaattgcttgttttttatctttcgcattattcaaaatttcttttaatatatcatctgaagacgtgtcgccagttgatgcaaaatgtttcttcaattggtcaacgatttggcgatttgataatcctttattcgtccaatctttagccaatttatctgcttcagcttttcctaatttcgtttgtaaaatttgagaaatcaatagcgacttatcttgtgattgatcaatcaatgacgttaataaatcatcactcgttgtcagagatagttgatcaatatgacgagtaatttgatctgcaatttgttgatccgttttaccatcaacacgtatatcttttagaattttatctgcctcgtctttattaaatatactttctaaaatgctttgtgtagcatactttttatcatcagtacgtgcaagttcttccaaaataatatttcgttgactttttatacgctctttcgtcttatttacttcgctcattaagtctgatttttgatttttaggaagttgcgtatttgcaatacgttgatctaaagattgtaacgtattcagtttataatatgtgtaatgttgcgttgaggcattacttttagccaatttttcaatcatagcatgattaattttatcgcttccttgtaatttatcagtgagtcgattactatggctttgattctcttcatttgaaagaaatttatttaacacaacatgtccagaaccatcattatttggcgttttagctacttcatgattattatctgttgtagacactgctggatcttccgatgtatctttcgatgcatctttcgatttgtgtatttgctgattcaaatggtctaggtcttctaacgccttatttaccattgcttcatcatttttatcatctttttctccatgttttgttgtagccgtttgtgacatatcatttttcattgcattaaggtcgtcctcgccactttgttgacccctatcaacatttgaagaaacctcatttaaatctttaagcaattgatctaatttactgtctatatcactttgaccgttcatttcactgtgagaacttttattgtctttgctatccaactcattagctcgttttatgatttcatctatttgcgatgctgttttcgcttcatttagttgtgctttataatgtgctttagatgaagccgataactgttttaattgctcaatttgacgaattgctttgtcaactttgtctaataaatcttgcttagataatatctcttttgaaatttcagtatccttttcagatgcagcttgggcatcgtacggtaagatattcgttaaaatgatacttgtcgccatcattgtcgaacacgataactttacatataattgaaacggtttccctcgatatttagccatcaacatactcctttctcacttacttccttcaaagaattacatactattatatacctgtttacaagaaatttacacttatctatctagttattgttgttagtaattatccacttattacttagcttatatttaagtaaacaaaaaagcatgacgtaatatcatattgtccatgtcgctaacatcatattacgtcaaatcttttaaattaaatgatgctttattttagactgctttttctttttagctttcgagcgcctgtttaaaaacttgctcgaattgttcacgcgagatttcgtgtgcatgtgctttttgtgctaataaagcatatcgaaactgttgttgatctttcaaactctctaacatttgtattaattggtctttactttccattgttatctcatcattatgctcaaataagtgctctgataatgttactttagcatggtgtgcggtttgacgataacctaaaatcaacaactcatagtcaaacgcttgttccaccgcatttaaaatttcattaccctcattgatatcaagataaatatcacataactggtatagttcatttaccctgtctatattaatagatgggtataaatgcacattagcatattgatcaagttgcattagcttatcagacatctctgtaatagcagcgatgtgaaacttaaaatctggtaaagtttcaaccaataccttgatgttacgaagttgatccgagttagttaatattacaatttctttagtatatctattacgactacgatagttatatagatatccgccttgtaaaatacgagattgaacctttgcgtctgctatattgagcatcgtttcatattcgtttttatctggaataataatattacaatgtcgtttcatatcacctttacacatcaattgcatatttcctgggacattaccatcgcactgttcttgccataccaaaacatcactaccatttgatggcaaattatataacactgaaaatggtagggctagtgagttaataacgaaatgatgttccgtaatttcaagttgcttgataaaaaataatacgaatgcgagctttgaagggaaaaagtaagacttcccttgccaatccaatatgacatcagatgttacaaaattttcataaatcacttctttaccttctgctgtcatatatttcttcaagatcgctttacgatttaaatcgtaaacagtttgtgcaaatttaataccattcttagaataataatcgacaaatcggacacgttgttggtcatcaaaccattcgacacgactaacaattctagggcgctctccactttgataaaatattttgcctcgtagacgtcccatatcattaattgtagccgaattgttgttacctttaatttcccaaaaagctggtacagtaacctgattaaaaaatcgtggtttcatattttctgtattatgattatctgcaaaaaattgatacggtgatataacatcgtccggtaaaaagccattgtcattgagtacaattgttaaatcttcttccaacttactggctttaaaagactcatataactttcgtgaatgatcgttaaagtaatcaaataatttaatcatgtagcacctcttgaactaatgtttcccattttaaaataatatcttgagtcataaattgctgtgccacttcataagagatgtcatgtggtgtctggggaccattgttaaaatacattacaatggcatgagctagttttgcgataacatcatccacactatcttcgtcggtatcaaaaggtaccaagtagccattttccccatctcgaataaaggttgggttaccataattcacatttaatccaatcatacctagtcctgagcctaccgcttccattagtgttaacccaaaaccttcgctagttgatgcagaaagaaataactcataatcattataaatttcatcaagtttaacatgccctagtaaacgaatataatcttgtgcgcggtgtgtatcaataattttacgcagtcgcgtcttctcgctaccttctccataaatatcaaatgttaattctggcacttgtcgtttagccacgataaccgctttgacaagccaatcaatatgtttctcatttgctaaacgagatgcactaatcatcgcatatggctttcttgataatgttggatatgataatgcatcaatgcttcccacaggaatagtataaacacgtgggcgataaccttgatattgctcaaattgtcgacaaaccatatgattttgaatatctgttgctgtaataaagaaatcaatgtatttagcttttgaaaattgatattcataataattgttccatagtatatgctgctcgctcatcatattattactataatgatcagcatgaatcacaacaccaactttactatcacctttatgctgcaaaacagcctgaccaatatcagaagcgcggtctaatatgacaatatcgtctcgggttaaattcaatcgttgtaaaaagtatgcaataaattccgttttgttatacaacaccgcatcttcaaacacatatatagagctgtctccatcaatatattcgttataagcgatggaaccatcttcattatagaattgtcgcatatataatttcgctttattatcagctggtgcataatactcagaaaatatacgcgtataactataaaaatctttacgtactaacatactattaattacaaattctgcacgatccacaacatctttttgttcattttgtagataacatgttacaaatgatgatttcccattaaaatatagacggactatcttaccatttctttctctaaaactaatttcatgaccaagctcacgttcaatgtcatctaacgtgtacgttgttggtgctatagaaatatcactaaaatactgatacaaccaaataacttcttgatctttaaacccaatgttttgcgttaatgtctgtatgttctctgactgtataaaatctaaaaacacaaatttagtgtcttgatttgtacgtctcaataatttagcacggtaagcttgtgcatattcaacaccgctactcgcccagcctataccaaagtttatattatatattgtcatgcgctaccccttttcatttatggaaaatgtataactggcataccctctttatcaaatgtaatcatgctttgacaaatatttttcaccattctttttttgatatttcgcgtcataacttcaaatgaatctaatgcaactctatggtattcaaaaatagcgttacgttgcccattttgtcgttgattaacgcttgcttttaattgttgtaaatagtcgacttgttctaaccaacatgaatcaattgctttcaaaaagactttttgaacgaaaatattataataatatgcactttgcatgtttttacgattcaaagctaattgcttttcaaattgctctaataaaaatgtcactactgcttgcttatctttaaaattaacacaagccacatctttattaaattggaaacttaaattttgataaatatactcgacaacacgcgattttgttagcaccttttcctcatttacaaacatttcaaatacatctttagctaacgctttaaaatctcgattctcagcatcatctatttctaaaactcgattgcgttcctcgtatacaagatctcgctgtatactaatgcttttttcaaattcattagccatttcacgagctttaaccccttgttcttccgagatacgctgcgctttaactacaatttgcttaactttgcgattaaacaaattactttgcgataatcgttgtgcatctaatgaatataattgattattttccgctaaattactatcgctccatcgcttaactaaataatcatctagtgaaatatatatacaagatgatcccggatccccttgtctaccagaacgaccacgtaattgcctgtctacacggctattttccatatgttcatgaataataacagctaatccacctaatgcttcgacaccttcaccaagtttaatatctgtgcctcgacctgccatactagtcgcaacagtcatggaaccaatttgccctgcttcagctatcatctgcgcttcttttgcaacattttgcgcaatgagtaaattattaggaatatccatttggaataatactttcgaaaagtattcagccgcttcagcagttctcgttatgagtaaaaccggtcgccccgtttcatgaagttcaactatatcatgaatcatcgcgatgtttttctcatcaactgaacgaaacactttatctggttcatcgatacgttgaatcgctttatcagttggtacttgtacgactatttttgaatacaaatcaaagaactctgattcgcctaattttcctgtagctgtcatacctgaaaatggttcaaaaagtttaaataaattctggaaggtaattgttgccataacacttttatctgttgaaacctccataccttctttcgcttcaatagcttggtgaagtccagcttgcaacttagttcccggtaacatacgacctgtaatacggtcaattaaaacaatatcaccattatatacaaagtaatcgacattagattcaaacaaatattgcgcgcgcagtgctagattaatattacgcactaggaccatcgcttgttcgctatataaatcttcaacattaaagtatgattgtgccgcttcaataccttgatttaacagccatatttcttttttggtcttcttcattttaaaatgcacgtcttcaatcaatgtatctacaaactctttcacaatatgaaatagatttgattgtaatcttggtgcacccgaaataactaatggtgtttgagcagcatctaaaatgattgaatccacttcatcaataataccgtaatttaattgtggtaaaaatttcccttccgcactatcagccaaattatcaattaaataatcaaaaccgagacgtccattagttgtatatataatatcatgttcatatatattacgtttttcccctttttgatactcataatccacaatatcaacaaaacctaatgaagcagttaaacctaaccattcatataatggttgcatctcttcaaaatcacgcttcgctaaataatcattcgttgtaattaaatatgttccttttcccgaaagagcatttaaatataaaggcatcgttgccgttaatgttttaccttcgcctgtttgcatctccgcaatgttaccttcatgcaatacaatcgctccgattaactgaacttctttaggatacatacctaatactctccagctcgcttcacgtgccactgcataagcttcaggtaacaatgtatctagtgtatcaactcctgatgctaaacgttttttaaattctattgtcttttgttttaacgcatcatcagaatatgatttaacttcatcgctccatgtattgatgcgtttcactatttttctaatcgactttagtcttaattcgtttatcgtaacatctagtttatgtttcatttacttccccaccattcagtttcgatacatctaagtaatctaaaaatcttactggattcattaaacgtgacatataatttagatgcttgtcttgctcttctttaaaataaacctcgacatttgtatcttttagttcatgatttcctgggacatgttctttaagccattcttttaaatcatcatcttcatggcttgtacgatatactttgcaatccaaatgctgagcgacataagttgcaaaaacatttgactttgacccataactaatcaaattaatagccgttagggtatcttgactttgcaaatcatcctttagttgcttaatattttccttgatatcgtcttccatccaacgttcgacgagccaaacatgaccaaacggtttcaaaaaatcattcgaaataattgaatagacgtcagatggttctgcaataatgacatttattttatcatttccatattggttatcgtctatcttcgttacccgcatgcttttatattctaaatcatcttgatgcgtcatctctgtgattgttaaacatctaaatacaagactcgtcgatgctgcattcatcatttttattttataagcataggcttcatcaggatattgaatcgtaatactatttgactttacaatctcagtacttagttttgtgccatttttattataaaaaatgatgataaaatacactgaaccagcaggcgttgcatcaaaatcaaaatgcaatttataatgctgtcctctacgcaaaattggtaaacttggcgcacttttatattttgaaaattgctttaacatcaaccactcatgaatcggtaatccagagggcatcaaaggatttataaaagtcacttcaccatttgaaaatgatactttagagccatacataaatgtagtttgtgaaatataattccaagtaactttaaatgttttgtttttcagcatgttgaactctcccaaacttgtcttccaaaataatgttgtaaaaattaacaaaccaacttgcaatggtaggtgaatcatcattatgtcgcccaggaatactgcgattcatcactcttgcttggtgtgctgtcaatacaggtaatagctcttgaaatgcatgtggatcataatcatcatgttgcatatatgctatggcaaaaacagtttgtgacaatgatttcttttgaaatatttgccaaaatttttgatttaatgcctttatcgacgcttgagatgtatcaccttcattagacaccaggacgtctaatgctgtaccgaactcttctggtctaagtaatcgcatatgttcagcaatcgttccaatattaacaagtggtttaccaacaataattgcctgaggatttaactgagcaccataatacaaggcaccaaatgaacccatagataaaccagataatattaattcatgtgatttaaaattcagcttttctaatgtctcgtcaataacattgataataccttgttcatattcagatgaaccgatataaaagctaccaccttcaacacgaggatcgccgataagtaaaaacggtgcattcatacgtttcatcatataatatccttcgaaaccttccgctgttcgataaccactaaaatatacgtttagtggcggtttcatatcaccagggtggaaataataaataaattcctgtcgttgactatctacgaaacgactaccaccaagtaaaaattgacccatgtctaatctagaccatcgtttgtgtataggtcctaaatgtaccgtcccgttcccacgcgccttaacagttacacttatataagcatcaaatggtttcgcaggtatctctaaaggactgtctaacatatcatcagttaatatgatttgttcaattaatgcaccatcagcgccagtctgaatcaatctaaatgtatattgcaactcgaccgcaccatcaatatcaaattctggccatatttgaatgactttatctttatcgtaaacgagattattttgccaagatgcgataggtttaaattcttttccaaattctccactcaacgtgagctctgaattaccttggtatacgacatctcctttaaaattcggatgcacaagtgctaacttaggggaaactttatctccatactgtcctgagaagctaactgcctctaatttattattacgttcttcaatattccggtaatgtaatggttgaacaacgtatttttggacattttcgtcttgttcatattcaacagaccaaaatgattcatcaacatacgtattgtatggttcgcttatcatttgtaataaattcattaatgtctccgagtacggtgcttgaatatagataaaatcaaagcgcccttctgcttcaacaatcgcttcaatagcctctacataaccactatcaaattcaaacaatccaatatcgaagtaatcccaactcacaccttttttgtgttgaaaaataagttctaaatcgtctcctccaatttgcaaaactctaaatttacgtggcatcattttcaccttctattaactcatcgagctgattaataatattcttagaagcatatgcatctattaattttaaagaataggcgtacgcataattccaatttttcaaataaaataaataataatttaacgcatcatctaattcatcaactgtatttataatacggccattgtcataatcagagacgtaatctgtttgttgaccattaatttgtggaatcccagcgctaattgcactaatttgtaaatacaaatcaggttcttttgacatatctatcacaagtcgcaacgtccgcaatgcttctacaacatcatgttcagcatgtatcgtcttaacagcaatgatgtcatcttgatcttcaggtgtcattaatgctgaaacattaacatccgcattctgtttagcttggtattcctcatttaccgacgtaatacattcacgaagccacatcggtatgtcattttgatggcgcgttaataaaattaaacggtaattatcttcttgtgcgatataatccacaagtcgttgcatcatttgttgcaaatcagcgtcactcataccatcaatccatacacctataaatgtttccatcaattgactacttatattaggtgattgtctcgtttcaaatggcgtgattcgaatcattgtattctctcgctgatacttctcttgatgactaattaaatcacgttctagttgcacactatcaacaattaaatgggcattctttacgatagattgatattcctcatctgacacagtttcatttctatttttaaaaaatgaataacttaatgatttcgctggaatatgattggctatttgtcgattgtgcctagcatctgaagccacaatcacatgatcatcttcatgtatttgttgtgcaatcatctcttgaaatttctcttcaattagttgagccatattgttatattctgtttgttgatagtgatgttgatatctttttgaaacagtgactctgccatttttcaaatcttcatgaagtacacaatctccattaatcgttaaatattcttggtaagaagcctctccctgatcatcaaaataacgtatcgctgataaataacctctgtcatcaaaaatataacgccgttgtaactgatctctttcaaattcttcaaaccaaattgaatacccttcttgactaaaataaatatttgtataggtctgttcactcgtcacacattttaataaatacggtgtgtacacaaactcaacatcatccggccattttaagtgatgataattaatcgcttgtggcgcatggtgactgaatccttgaatttcatcaaacacagacgaatactttgtctcatataagtcatatcgatgtaaaaatgttcttaaatttggtgcatgattgagaacaatcagttgataatctaagtcattttcaaggtgcattcccattaaactaatcatatcgtcaaattccgtcttattttgtagttgataatacggcacagtcgtgtcttgccaccatcgttggtcatcgtaccaagctggaataaagtatttcataattacctccttaccaatactggcttaaaaatggcttatatttatcaaaatataaatatgtacgaattgtttctgcaatattaatactgatgtaaactaatacaatcagttgtactgagaaataaatttcagtagataaatgcggtacaaacaatgtgaaataaagtggtataccaataatgactgtaactaatgccgatccaaaccaacatacgcgtcgtgcttgataatttaaataacgttctgtatccttaccaggtttaactcctgaaaaataattgccactctttaagaaatctttggatttttgtttagtattgattaaaaatctcgataaaaaataacccaataacatttgaatcactaaatatactgaaatacctactggactatcaaatgtcagcattggcatgtcatctgatatgcttttattaaacatagataaaataaaatgaatgccactttttaagaaaacaaaagctgaaatgctcatcattaaagtaatactgcctgcagggttaactttccaagataaataagatttcatatttgttgcggaaacgttcattaaatcgatatatggtattctcacttctactaattcaataaataataggataaacaatgtgattatcacaaggatgattaacaacgcaatcacaatatgacttgcatctatatattccattttttgatgcatcattgatttaataatgctaaccattacaatcggcattggtcctgcgatgccgtaacgactatttttgtcagctaaccaaactaataacatcgttccagtaaccaaaatcaatattgttaagtaaatattgtcttgatgaacacgttctttcgaaacatattcatgaataacaaaataactttgaataacacttaaaattaatgttaagatgcgctctttataatgcttctcaagacttgtttgtttcatgtatttatccatattccgataagaaatcagcatcaagataatcattgatgttaaccacggacctaatcctaaagtgaaaatgtttaaagtattaacgtctccacccatattagaaatagctattttaaaaaatgactcatgttttacttgcatatcgttataggaaacgatggaaatgtttgtacctaatatataaataaataatataaaacatgtgtatagcatacgtttatatataattttatattcgtattgttgtaaaagttttaacatgttgcacctcttttatatcaaaaacattaaaaagactaagggttcatcactaattattaaaatcctatatcgatttttctagtgattggtgcctcagtctttttaattttagccagctataaattcaatttatgcttgagaatcatcttgatcattttcatctttctttttctttctcttcattaaacctaaaccaactaataatgtcataacgccacctagtaatccattttgttttattgagtcacctgtatctggcaatcttttttcactttgtgcaggcgtgccattatgtttagtcacttcagatgttgcacttaatgtagactgagattcactcgtgctcgttgttgcttcacttgataagcgagatgtgctcgtgctgtgagtatgatgcatactcattgagtctgacggatgcattgagttagattcagatgtacttgttgagccggacatacttgttgatgttgagtcagaaatgctttgtgaaccagacatagatgtactcagcgattcggatgtgcttgtcgaatcggatgtgcttgtcgaatcggatgtgcttgtcgaatcggatgtgctcaatgacgttgatgtgcttgttgacactgattctgagtcgctcactgaagtcgagttgtacgttgaaccggacatactttgtgacattgaaacacttgttgaatcggattcactcattgatgttgagtcagatacgctcgttgaacctgaaccagacgtacttaatgattcagatatgcttgttgaagttgaaccacttgttgagtccgatgtacttgtcgatgtcgagtctgaatctgatgtactcaatgattctgagtcactgatagaagttgaatcacttgtagattctgattctactgtactttgtgaaccgctgatacttattgaagtagaatcactgatactgtctgatgttgataatgatgtcgacaccgatgtgctttgtgatgacgatgtactagcactcattgacattgatgttgatatcgatgtacttaaggaaccagatgcacttgtacttgttgactggctttgtgacattgaatcacttaatgatgtagatgtgcttgttgagctcgagtcacttaaacttgttgaacctgatattgagtcacttaaacttgtcgatgttgaaactgatacgcttccgctcattgagtcagatgttgaaagtgatgtactcgttgaatttgatccactgatgctagacgaatcacttgtagacattgagtcgctttctgatgcactgatgctcatagagtcaaattgactattacttgttgagcttgactgcgaatcgctcacacttgttgacgttgattctgatccactcatactttgcgagctactcaatgattttgaatcacttaatgaatccgaagtgctaagacttgtggaaccacttaaagatattgatccacttaatgagtcggagtcacttgtactagtagaatcactcattgatattgaatcacttagcgaggtagactcgcttacgctttctgaaccacttaatgatgttgatgtactcaatgaaccagatgtacttgttgaagtcgaaccacttgtcgattttgaatcacttaatgaatcagattcactcacgctttccgaacttcttagtgacgtcgatacacttaatgatgacgaatcgcttgtgcttactgaatcgctcatcgattgtgagccactcaatgaacttgactcgcttacactttctgattttcttaatgacgttgagacgctcaatgagccagaatcactgacacttgttgagccactcatcgatttagagtcactttcagaattagattcacttacactttctgaatcatttacagattctgacatactttgtgaatccgatatgcttgcgctcattacttcactagccgatgttgatgtgcttgtcgaatcacttaatgatacagatacactcattgaatcggatatactcatacttgttgagtctgatgttgaatcactaaaactatcagataatgacgttgagtcactcacacttgttgatgtacttgttgaaagcgacatactttgtgaatcacttgtacttgtacgcatcgaagtactcgttgaagctgatgtactacgagagtcacttgttgatgttgatgtacttgctgatccagatgcacttgtacttctcgatgtgctttgtgaatcgcttaatgatgttgatgttgaatcggattcacttgtactttctgatgttgagccagattctgatgtacttaccgatgtagataaacttgcaatggtcgacatgcggtttgaagttgatgtacttagcgaatcacttaatgatgctgatgtgctttgtgaatcggattcactgctttgcattgacgcagatgttgaatcacttaaagatgttgacgacgaatcggattcacttgcgcttgctgagttactgagcgatgttgacgtacttgctgatcctgagttacttgtacttgttgagtcactgagtgatgttgacgcactttctgatgttgattcacttgcacttgttgagatactttgtgaatcagattcactctctgaaccacttaatgacgctgatgtgcttaccgaacctgattgactcgtacttttagatatacttgttgaatcgcttagtgacgttgatgtcgatgtggattcactttggcttgttgactgacttgtatatgatgatgtgctttgtgaatcggattcgctcgtgcttgtacttgttgagtttgaggcactttggcttgctgagtttgagtctactccgctttgattcattgatgcacttagtgacaatgacgtactcgttgagtcagacaaacttgtactcgttgacgtacttgtacttcctgatgttgattgagacatacttatgctcattgatgttgaatcggatttactttcacttgatgatgttgagtcggattcactttcacttgtagaaccacttaatgatgtggatgtactaatggaatcagatttacttgtactgattgaatcacttgtcgacattgatgtacttaatgaatcagacttactatcacttgtggaatcacttattgatgttgacaaacttgtagagtcagacaaacttgtactcgttgacgtactcagtgatgttgaaacactctcgctcttaaacgttgacgttgattcactgttacttgtcgatgttgaaatggacgcactaccacttgttgaattacttaatgatgttgaagtgctaccagattctgatgtactgtctgataatgacgtactcgcacttgtcgaactactcactgactctgatgttgattcagacgtactttcacttaatgattcacttaaaaaggcagatgcactttgtgattctgaatcgctagtactatttgattcacttaatgatatagacgtgctctctgaagcagatattgcttcacttatagagtcgctcgttgacattgattcacttattgaatcagactctgatgtacttaagcttgtggaatcactcatagatgttgatgtacgttctgaattacttgtacttaacgatgtcgaagtacttaccgaaccagatgtgctcgtagaagcactttgtgatattgattcacttgatgcagttgaagctgatttgctatcactcgttgaatcactaaacgacgttgatatgctcattgaatcggattgacttgcactcattgaaccagacgtactttgtgattccgaagtacgtactgaagcacttgtcgacgttgatgtacttgttgaacctgattgactagtacttagtgataatgacttactatcagaatcagatgtactttgtgaatcacttaatgattctgatgtactacctgactgagacgtgctcattgaactacttacagacattgatttactgtctgatgcagataatgacccacttgtactgatagagtcacttactatctctgaagtactcatcgagtctgatgtacttgttgagacactttgtgatgctgctatgcttagtgatccagaaacagaaccacttgtgctcgtcgaatcgctcaatgattctgatgtactcatcgattttgaatcacttgtacttaatgatattgatgtactttgtgaatctgatttgcttgttgacgcactttgagagttggctatgctatttgaaatactgatagagtccgaggtgctagctgactcgctcaatgattctgatgtgctgattgcattcgatgtgctgtcacttaatgattgtgacgtactagacgattctgatgtacttgttgatagactttgtgacttagacaagctccccgatgtactcatacttaatgagccactgagtgacgttgatgtacgcaatgaatcagatgtacttgttgatagactttcggatttttcagtactgctagagtttgaaatagaatcgcttaatgatgttgatttactagctgaatccgacatgcttgatgatacactttgtgaattcactaaacttgtgcttgttgagcttgatacactattactttcagatgtgcttaatgacttagatgcactcacagaatcagataggcttacacttgtcgatttcgaggtactagctgatgtagataccacaatcgatcctgatgtactcgttgatgcactttgtgagtcagctttacttgttgacacactttgagattgttgtgtacttcctgatgttgatacggaatcactcatgctatttcttgttacttcatatttaaaagttgttgtcgttttgttaccgctcgcatctgtagaaacgattgttatagtacttgtaccaatgtttgttggtgtaccactaatagtattatttgtactatcaaatgttagtccggatggcaatccagtcactgtattcgtcaccgcatttccactgttatcttgcgtagcaattttaatcggggatattggtgaatacacttctgatgattgatctcctattggtgtcactgttggtgctgtcgtatccacaacatttattgtaaaagttgtcgtcgatttgttatttgcttggtcagtagacacaactgtcactgttgattgaccaatttttgttggtgtcccaatgattgaattcgttgcactatcgtaacttaatccgcttggtaatcctgtaactgtatttgtcacagtcccagtaccattatccgttgtagtcaatacaataggattcattgttttacccacttctatggtttgattgcctacagttacagttggtgcttttacatcagtaaaataatatgtcactgattgtccagcattcgtcatttttacagttttatttgtatcattataagttgacgcatatgaactatcgacggacgtgtagttatatcctttagcagtcaatgcagattgctgattatcgattgtcacgacttgatcaacatttcctgaatatgtttttggtggaataatatctttacctgttgttacatcaacgtatctcacttgtgtaacagcagactctgtatattcgaatgttccaaattgtacttgttgtaaatttgtcgcgccacctgttgaggctgtcattgataatgaaaagttggtcgtaccacttttcgcaatccaatctgaaatattacgtgtccatgtttgacctgcatatttgacagtcataacctttgtatcaccattatagttaatatcaaaatcttggaacgtgttatttgtaggttgaacatttaacttcgcagcattatcagctgttgaacttgatgtatacgttgtcgcaacaccataactatctgttgttacaaatgcaccaaacgcacctccaccagctacattagatgggtcagcattcgcctttgcagctgaatttggtttagatgtattgtgatacgtatccaatttgaagccaaatgcgttacttaagccaccaatacctactgcggcaccgtttaaccctgtttcacctaatacacctggtgaaaaggcaaaaccgataccatctccaccatttccatgcccttcatatttgttacctaaatttacttttccagaaaaatgaaaactcttattagagtcaatacgtgttcctaatgtaatagcacctttttggctgtatgcatcctgtgttaacgtcacaataccggtactttgatcataggtagcattacctgacgttgtcatatattgttttaagttatctttattaactgtaattgtattagcagttactgcggttgtcgtcgctgctgacgcaaatgttgacatagctaagcgactgaaagttcgaagttttactggtgcggtgctagttgacgttgtgctagttttgtttaagttgaccgaagatggcgttgtgctttgtgaagtgttatttgatgcagtactttgatttgttgatgtattaattggttgttctgtacttgaagttgaagctacagatttagtatcagaacttgatgtagtattctttgaggatgttgattctgatgtagatgtcaatttttcttgttgattgcttgtactattagttgtcgaagtgaccttttcagacttttcacttgagactgtgtcactatttgatgtttgtaccgaactactatttttcgttacacttgtggaatcggctgttgatgttgatgcttcgattgtcgttgagttttgattacctactgtttcactttgtgtgtttaattcagaagttaatggtgcatcagaagccgcaaaagcttgctggtcatgcaacatatttaccgtgaatgcaccaccaataaccgccgtagttttcagtccgtatcccgtcatttttttactaatgctttgattatcttgactcactaaactatgactaataaatggtagccccataattttgaacatttctatttctttaattccggattttacccaattttttccagatttataaagtcttactcttgttttttcgtttgctaagctgtcatgaaattctttctgtcttttactcatgtaataactccttgtattatctttacattcattagattataatatatgccactattcaatttaatacaactcttttttgatacaaaaatactcattctgttaaaatttgtaaaaattcatttttattcgtctatatgtaatcgttttcatatttttgaaattactttttctcgtttatgcgtataatctttttttatataaatttggctaattggctttatgtttaatcattataattgtttcgtttttaaaataattattgtattaatatatctatatcatccaccttttatttataaatagttaatttacaactaaacgataaatattatatgcaaaatacatctttaatattaaagtaataccaatattttttcaataaacctagtgtaatatatgtgtaattctaaaagattcttctttaaaaatataaataccacgacatattgctttaacattttcatttataaagcgaaaaaatgcatcgctactaagttgaatgtttagtaaggatgcattgaattcactaaaatgattaaattacttatatcttttcatctgattgattatcgaaatttcttccttctaaacctgctaactcttctttagaagctgcaggtgctttcatttcaaatatctcattcactactgtgtaatcgtaatatcctaatctggcaataggtttaatcgacttaatgtccaatttaccattatcaagaataaccttatcgtcaatatgaacttgggcaactcttcctataacaatatctacggtagatactgggtctcctgtcggaatacgaatcgtttgaacgtactcacattcaaaatgtactggcgattctttgactcgataacctggtgcttctatacatgcttctttcgtcacacctgcatattcaaattcatcctcttcaggtggtagtgccttcgacgataaattaacagcttctcttaaatcatacgtggccatgttccatacaaaccaccctgtctcttctgcattttttactgtatctttacgctcatgatcaccaagaacagattgatttgctgcgaacataaccataggcggatcccaagttaagttttgatactgactataaggcgctaaattatctttcccatctttcgatacagtagagatccaccctattggacgtggtactgtactacttttaaatgggtcgtgcggtaaaccatgacttcttacaccttgttttggcgaataattcatactatcttcaccccttataagtaattacatttaaggttacgccctctttacataagcgtctaatataaataaacaatttatttataagtagaaactatatatgacgtggttgcttataatttgcgttcttgattcgaaaaattcagataaggatttatacaattaatatttatgatatcttttgtaaatttaattaattatagttacttcaatcatgattagtttataataataaagtgaaattgaaaaagacagctattatgcgatgagcgaaaaacttcaagtaaaacaagaatttaacggcgttacaaggcaatacttgaatttcagaacagatagtatcgatgatctggataagttcaaaaaagaattcaaacctgttatgcacttaaaaggtgatgcattcaatcaacagttacaatctttgattaacaaatatccacaaatacaaaaaaatatgaaatcagagttcattgcttattatgataaagaaaaaatagagaaacagtaaaaaactatgcttggaaccttcaaaaatctataaatgacattatgcaatcatatcctagcacaaaatttgtacagttttataaagatgatgtttccccgtcaatggtagatggaaatggccgtttaaaatcggatactaatgtaatttccatcgaaggaggaaagtataatgaaaacaaataaacttataactgatttagatgctattgagttaagtagcggttggaattacaattcgaaattggtgactggcaaaaatgcactactatcagatagccttttaagagatattaaagtattaagttctaatgttaaaggcgacgctgacatgctagaaatagaacttcgtgctgtaataaacgcaatgtctcaaaacgaaggtaaatctgttgatgcacttaaaaatagtaccgcttctctaaaaaacaatctaaccaaattaaaagagcaactcgacaaaactacacattaatttcatacattttgagtgaacagaattatatttccatagcaaacattcctaaactacacatacgttacataattgattcatttttatagaaacgggtaaaaatgataaagtaatcatctttcacaaaaaatcaaatattgggaggaataaaatatgattttacgttacgtgaccaatttaaaacttgcgaaagagctataccaagccagtaaacctaaattgcaagaagataagggtatgattgaactgtttgaacatacttttggcttgcaaaaagaacttgtaaaatacgtcggcattgcagaagcaactactgctgctttatactcagctagctttatcaataaaaacatttctcgccttgcttcactatcaacgataggcattttaagtgtagctgtttacaaacattttgaagctggccaaggtaaaaaaggtgcacaacatgcattagatttattaggtcttgctactttaagtttactagatacattttcttgtaataaaaaatagtcttcattttagaagcacatactttagcacctgtgtacttttgattcaattcataaacggtacaccgctatagcatgtgttttattatttttctggtctctttatcgtaaatattccccctaatttagcataatcatttccggctaaacgagaaacagcctgtaatgcgtgtggattgattttaaaatcaccctcataaatactgtcatcaatatgataagttacaatttcacctattattaaatcagccccatctaatacatctccaagcaatatcatttgcgatagtttacattcgaatctcattttcgcgtctttaattcctggcgtcttaatcgttgtagatgttaaaagtgataattctgtacgactcaactcactgtcaccatatgctaacggcgctgcagtctcattaatatcttgaacgttatcttcgtctgtaatatgcacaacaaagtctccagtccgctctatattcaaggcagtatcttttctcttacctcctgcacgttgaactgcaatagcaaccattggcggatggttattaacaatattaaaaaagctaaatggtgctgcatttactgatgcatcttgatttaatgttgtaacaaaagctataggtcgtggaataattgaaccaattaataatttatagttttctctagcagttaatgattgtgcatcaaacgtatacataatacctacctcttttcttagtatatctaggtatttctccgattttggttaatttaaacatctattctccgctgaaaatcacttgtatttatttagcaaatcttttgaaatatgacacatatgcatatcttctggatatttttctaaatgttgctgatgttcttcagcacttttaatgtaattagacagcggtaagacttccactgcaatttgatctctgtctttacgtcgttcaatgaactgacgagcttcaattaagtggtcatctaaacaactatataaacccgttcgatacttttctccaatatcatttccttgtcgattcacactgtatggatcaataatttcaaataaataattcatgatgtctgtaattgttaacatacgatcatcgatatgaagtttgacacattcagcataaccatcatacggaccgtctaatttagaacttcttccatttgctcttcctgcttctgtatgtataattccaggtattgttgcaaaaaatgcttcaacaccccataaacatcctcctgctacataaacaactgccatatttacacctcatcatccttttttatatttttaacaaggttataccatttaataccgccatgacatgattctgatacaccttcattacgatacccatatttttcataaaatgaaattaatgattctcgacatgttaacgttacaccatgtcgatgatgattcttagcaagagtttcaaaatagtttagtaagcgacctgcaataccctgaccttgataatttggtgctacaacaagacctaacacactaatatagccaccttcactattatttgtggagacatttttaaataaatcatcgctaatgtaacgctcttttatgactggaccgttgatgtatccaattacttcatcattcttttcagctacaataaaagtttcttgaatttgttcaattctcaatttcaatgcctctcgtgttgcagcttcttccggtgaaaaaccaatattttcaagtgcaataatttgatctaagtcctgcatgattacttttcttaataccataaaaacacttccttagccctatatatcaaaagtaataccttcatctttatattcattattttcaaactaccttcactataaaaaacgagtctttttattgaaagccattcgccttaatcaattagacaagttgtattatacgaattagtaaataatcatgattataattcattttaagcatactcaaaaagactggtacatgtataccagtctaattcgaaaaaatatatttagttaaaaccatttcaaaaacgacttcacttttcctggcttagtcggtctgtctaaataaacaaaattatcattgattactgaactggcatttcgaagtaatgcttcaatatcattcgaatatttcttcaatttatgattgtgaaataattcttgcatcaaaaatggtctttggtcacatgaatgtgcatctgaagctacaaaatgagccaaattacattctataaattgtaatgataacttttgaatgtttttaccaaatccaccaactaaagaactcgatgttaattgactcaatgccccatttgcaaccaattcatataatatttctggatttttggcgatacttctatttctttcaggatgtgcaatgattggtatgtagcctctcgattgtatttcaaaaaacaattgttttgtataatgtggtacttcgcccgttggaaattcaattaataaatatttcgaacgattaataccttgaatactaccattatctaagcctttcagaatcgaatctgtaattctaatttcttgcccgggaaataatttaatatccaatgcttgaacttctggatgcgttcttaactccgccaatttcacaagcacttgttgaaatgtattatcatatctcggatgcaaatgatgaggtgtcgctacaatacttgttacaccttcatccttagcttgctttaatagtgcaatactcttttcaattgttttaggaccatcatctatatcaactaatatatggttatgaatatcaatcatgattcatcagtcccataatatgcatagtaactagcacttttatctttaggcattctatttaagactacacctaataatttagcacctgttgcttcaataagttcttttccttttttaacttcatctttattattattttccgaattaactacgtagacaacattgccggtaaactttgaaaataattgcgcatctgtaactgtgttcactggtggcgtatcgataattacaaagttataattcatcaataatgtgtcatacaaatttgcaaatgctcttgatgtaattaactctgacggattcggtgggattggcccagacgtcaagacgtctaaatcttgaatttcagttgagataatactgtcttgataagttgaccaatttagcaataaacttgataggccttcattgtttggcaaattaaaaatataatgctgcgtaggtttacgcatatccccgtctacgattagtgttttataacctgcttgcgcatatgcaactgctaaatttgctgcaattgtagacttacctgcgcctggtgcctctgaagtgattacaatgctttgaactgcactgtcaggatttgcaaacataatatttgatcttatgcctcgaaatttctcgctaataggtgactttggttgttcatggacaattaaacttgatgtacttcttcgtgtattcgtcatggtaattcctcgtaaattaaaatttttgtattgaacctaaaataggtaatcctagttgcgattcaacatcttcttctgtcttaatacgcttatctaataattcttttaagaaaataatcaatattgctaaaacaataccaacaataatgctgatcactaagttgacagatactattggagatacttttacagcattatcatgtgctgaggaaagtatcgtaacattatcaacactcataattttaggcatgtcatgagcaaaaactttagatattctattaacaattttgtcagattcagatttattctcagttgtaactgatacagtaataatctgagagtttgtttgattggttacttttaaaaacgaattcaactcagctgttgaatactgaccatcaaactctctagatactttatctagaattcttggacttttgataatttccgtatatgtattaacagactgcaaactactttgaacattttggaacgctaaatcacttgaggactttttcatgttcactagtatttgagtagaagcagtatatttgtcaggcataacaaaaaaggttaatgccgcacttactacaagacatattgccggtaaaataagcaataatttaatattcttctttagaatatttaatagttttactaaatcaaacttttctttcatggtttcctccacataatcaatcattgtattcattatgtatgttttataaatcggacaattatatctagtttaacgaccacaaaacatacacaactacattttctctaattatttatataaatattttatcgtttaaaattatatcacgattctctaccgttatgtataacttatttatatttttgtataagatataatattgtccaacttcaaatatccaaacctattaataataaaactagataccatcgtactctatcatggctttcttataatcgagtagaagcatcatcattacttgattatttgctctttacaacaccgagcgtgcccgtactcggtaattcaataccttgcctaacccgtcactgtgagttgggttaatgataataaagcccacaccttttaaaaagatgtgggtaatttatataatttttatttacatttttaacttataaaaaaagcgcctatgtcatgatttaccatcacataggcgcttatcaataaattattacttattactttccatttcatctaatttatgcggatttcctgtaattagatgacaacttattcttttcaggggaacattacacttttataatatgttcaaagacaaacttaaccattcacaaatataaagaataatattatcaaatcattgaacaaatcgtattttgcaacaattgatatttatattaatgtattgcatttaatttataaaattcatatacatcttaatattctcaatatcgatttgtattgtcaactttatatagatttaaaaaaataatctcatgtctttttttacaaaagtaagttaattattacaaactagtaacaaaaattatttcttcaaaaatatatttagtagcgaatacacttcatctttgaattgacttttactttcttccactgctccaaatttttgcgaaaaggatgctttcaaataccaactttcaagaaacagcaatattaaattctgaaagtcttcttttgtcatctttatctttgattcatcatagaattttgctatctctttacttaatgattgatttaaatcttgtatttgtccgtaaatatttccagaaaattcctcaggcgtattagataattgaacgtacattctaatatacctttcttcgatgtcgaaaataaactcaaataagaattgatataaagcatcaattgaatagttcgatttattttgattcatcataataatattattaaggtaatcaaaacagcatttaacactttgttcgtaaatactttttttcgagtcaaaatggtaatataaactcgctttctttatatttacacttttagctatatcatcaagtgttgtaccgtcataccccttctctgaaaataaggttattgcgttatcaataatcttatccttcaatttttataaccccctactgaaaattaatcacactatgttacaggaaaattaagttgcaattacaaatatttccgtttaattataacaacaatctattgcaaattaaaatactatcaattaccatatggcttacaacctaactaacgaaaggtaggtaaagaaattgcaattttttaactttttgcttttttatcctgtatttatgtctatttactggattgtcggttcaatttatttctattttaccagagaaattagatattcattgaacaagaagcctgacataaatgtggatgaattagaaggcattacatttttacttgcctgttataacgaaagtgaaacgattgaagatacgttgtctaatgttcttgcactcaaatacgagaagaaagaaattattatcattaatgatggaagttcagataatacagcagaactcatctataaaatcaaagaaaataatgactttattttcgtcgatttacaagaaaacagaggtaaagccaacgcactcaatcaaggcattaaacaggcttcatatgattatgtaatgtgcttggatgcagatactatcgttgatcaagatgcaccatattatatgattgagaatttcaaacatgatccaaaacttggtgcagttacaggtaatcctagaattcgaaataagagttctattttaggtaaaattcaaacgatagaatatgcaagtttaattggctgtattaagcgaagtcagacacttgctggcgcagtcaatactatttcgggtgtcttcactctatttaaaaaaagtgcagttgtcgacgttggctactgggatactgatatgattaccgaagatattgcagtttcttggaaattgcatttacgtggatatcgtattaagtatgaaccgcttgccatgtgttggatgttggttccagaaacattgggaggtctttggaagcaacgcgtgagatgggctcaagggggacacgaagtattactacgagacttttttagcacaatgaaaacgaaaaggtttcctttatatattttgatgtttgagcaaatcatctcaattttatgggtatatatagtggttctatatttaggctatttgttcataacagcaaacttcttagactatacatttatgacatatagtttttcaatatttctactatcatcatttactatgacttttataaacgttattcaatttacagtcgcactctttattgatagtcgctacgagaaaaagaatatggctggactcatatttgtaagttggtatccgacagtatactggattattaacgcagcagtagttcttgtcgcatttccaaaagcattaaaacgtaagaaaggtggttacgcaacatggtcaagcccagacagagggaatacccaacgctaaaatcatcgctaaatattgtaagagaaacagcacttatcgctatatcgtgtgtcttttggatatattgtttagttgttctactcgtttatattggtactatatttgaaattcatgacgaaagtatcaatacaatacgtgttgctttaaacattgaaaatactgaaattttagatatatttgaaactatgggcattttcgcgattatcatttttgtattttttacaattagcatattgattcaaaaatggcagagaggaagagaatcgtgaagtatagaaaattaataattttagtgttgagtatcttgatcatattgcctgtaagcacactggatggtcatcatattgcaaatgcagatgacgattcacctaaaaaactgaaatataaagaaaatagtgctctggcattaaattatcaccgtgtaagaaaagcgaattttctgaataattttatttacttcttttctagtagtaaagaaattaaaaattatagtgttagtcaatcacaatttgaatctcaaataaaatggctaaaatcacatgatgctaaatttttaaccttgaaagaatttttatattacaagaaaaaaggtaagtttccaaaacgaagtgtatggattaactttgatgatatggatgaaactatttatgaaaatgcttatccaatcttaaaaaaatataaaataccggcaactgggtttattatcacaggtcatgttggggaagaaaactttcacaacctcgatatgattagtaaaaaagaactaaaagaaatgtataaaactgggttatgagaatttgaaacacatacccacgatttgcataacttatctaaaaataataagtcaaaattaatgaaagcttctgaagctacaatcataaaagatttaaacaaaagtgaaaaatatctaactaaaaactttaaaaagtcgcagaaaactatagcctatccttatggcttgatgaatgacgataaattaccggtaatcaaaaaagctgggttaaaatacggtttttcattagaggaaaaagcagtcactccgaactccaatgattattacatccctagaatattaattagtgatgatgcttttgagcatttaattaagagatgggacggattccatgaaaaagattagacttgaactcgtatatttacgcgctattatatgtgcaattattattatcacacatttacttacacaaattactttaaaacatgaaaatatggagggaggatccttagtattacaattttacattcgtaatattgtgatttttggtacaccttgctttattatcttgtcacagttactgacaaccttgaattaccaaaaagtcacctatagatacttaactacacgcgtaaaatatatacttattccttacatattaatgggattgttttacagttatagtgaatcattattaacagattcaagtttcaataaacaattcattgaaaatgtcctattaggtcaatggtatggctattttatcgttgttatcatgcaattctttattttgagttatatcatttttaaaattaactataacctattcaacagtaaaatattattattgttatcttttattttacagcaatcatttttatattactttacgaacaacacagcgtttcacgataccgtgctacactattatccattaagtgaaaacactataatattcggatggattttttatttctttttaggtgcatatatgggttataactacgaacgtgtattaaatttcttagaacgttatttagttattatgattgtattagctgtagctacttattttgtgtttattgcgttagcaaatggagactattggaacgttaccagcttttcatattcattaacaccatataatagtattatgtttattgttatcttgggaatttgcacgcattttaaaacaatgttatttaatacgattcaaatgattagtgctttctcattctttatttatttattacatccaatcattctagactcattgtttgcatatacaaatatatttgaggataatacaatggtctttctagcgatatcactactattcattttagggttatgtataggtgtcggtatgatattgcgtgaattctatatctttaggtttattattggaaaacaaccatataaattgaacattaatgcttattaattattaagctatgttaaaaacacgcggtgggcgaaatcagtttgaattgactgacttcgttttaccgcgtgtttaataatgttatacatatattctaattgcacattattgtaagctgactttccgccagcttttatgttgggcccccgccaatgttttacttgaataattcttttagaattctaaataatgatccgattaattgaaagaagtctgcagtcattgttaattcctccctttactttttaacttatgcttgcttagtatcagtcaccttttcagttttcactaaatcgtctgctaaatgatgccaaaaatcttgtaattcttctcttgtgcgcactgtatcagaactgtcttgtcctacaaagtcaacatgatcccaatcatgttttgtaggcgtcacttgccaaatgcctttttgaattttatctgtcgcttttgtataagcttgattaaatggatgttgagaagaaataacggatactaaaccatcgttttctcgccattctttttcagtagctttaccgattaagttaccagtaatcacaaatgggaaaaacatatttaagtctgctttttgtctatcgctatttaatgctttgtgcgttgcttcaccagtgtatgttttatacacaatgttagggttcaacgacgttttacgatttaaatctgttgcaccctcacgcgtcagatcgtaaaatccattatcttttgatttccataaattagattgtttaacgcgtttgacataatcaatatatgattcatttggcttctgttttagaccccattgagccaacccgaagtctactcttgaatttttattaccaaacattttaccgatatcaaatacgatttgtctcactaaagcttcattaccagctaaatctgatgcgtgtgtaccattatgtggtgttcctaaagtagtaattgatgaaatcatattgtcatgattacctttgaatagtggagaaatttcgccaccatgtttcttttgatactctatttcttcacgattaccattacgcagtaattcttctagttgacgtatcgtttgaccgcccatactatgtccaactaggtgtaccttctgtcctggtttccagtctttgtaaattccttcgtatgtttttccataacgttcatgtccatattttgctgcatgtgctgcaccataatctacacgaccgcctttgatataataataaagttcaactgcgcggtcatagttacttccaaaagcacttatacttgcttcataagctttgtaaccattttcttctaaatcttggcgaatgttcattttattaccgccccaataatgagctaacactgaaggattaatatcatctgtaaacccattgaaaccatgcactaaaacgataggatcctgatttttatactgcccttgtttggcaactttattcgtttgatcatctttcgcttttgcagtaagttcctttgtccctttgtttggtaacgttgctactgcactactttttaataaatttaatccatttttcttgtcattgtcctttgttggttctactggtgatttttgattgttttttaaatctgaaactgatagtgttttttcgtctttttgaggtttcacttcttgttcattgttaaaattgtagttagtaattttatcattcgcttgattattttgttgtggttgtactttctctatttctgtctcattaacaatttctcgttgacttgtttgatctaacttatttaatgatggtgcttcctttattcgactttgtgaaggtagattgttattagcgtttgaatcttgactattatctgcctcttttgactgttgctgtgacgccactttactttgtttaccatcattaatagcctgttctaacccttgatttacatcgctaggattagcattgttattttttgttgtatcacgttgaatatttttattattaagcgatgattttttatcatcctttagttgatctttattcaaatcatctgttttacgatgattttcttctgatattgttttatcattatgcaagttcttagttaaattttcagtatgttgctgttcgtcaacaccgttttcacgttgataattagcattttccctagtttgttgatccccaatagattgtgctgtaactgtatcctcctgtgaatttcccatattcacttgcttctcagctgcttgtgcttgtccaccacttaaaaatagtaatgtagctattaaaatggaagatgcacctacactaaatttacgaatactatacttattttgacttttcatcattgtcagcacctctatttttttattttagataaacaaattgataattattcgaggaataaactcaaataatttacttaaccaagcactcataatgaccatcctttctattgtttaatttgacgagaaagcgtttacatttgtatttaaaaaatatattctccaaagagaatttaaagtgtatacgctaatcatttcaaattattaattaatattatatttggcaaaatttaattagtcaataattagacacaatttaattatgcaaattgtaacttttttacatatatcttttttgatttttaatatttacatgcttggggcttaattccaatgatgtattatttttttagattagctatatggggagatttatgagctattacagttattatgtttgctggtgtcgtattttaaacctaaaaatatcatcccatccacaataattgtatcaggataaaccgtaatacttgttcctaaactaaatatatacagttaattttcttccctcaaagtaagtatcctactatttttaatttattgtttaattactcttgaactacctttaacttaatctcgaatttatgatgattagcataaaaatacatcccataaagttagttttttagtccaactttcgggatgcacatcttagttctaatggagattgtcttttaaataggctatgacatttctatttcaggctagatatatttttattcacagtataaatacaaagaatgtaaagacaactatgatattaaaggttactaaattctctttagctttttcgccattttttcccttcataacttcattatatcgattcatatacttttcaacatctttaacagtgacatctattcctgagttgctcaattcacttttcataattatttttggtttcgtattgtgattatccactacttatctataacgcgtttgcaactttagtaccatcacagcattcatagttaaaatatgttggtgtcgtattttaaacttgaaaatgtcacgttttccacaatatttgtaagtgtataagccatgatccttttctctatatctcagcccatacttgctttaccactgttcgatattttgtcgttcacctttaaagttattgcgcttatgatgtctacgcgctaattccgcctcaatttctgaaaaatcgatgcctagcgcatgcatcaagacaaataaatgataaagttcatctgctacttcacttacaaatgcttttttgtcacctttaattgcttcaattacgacttcaaaagcttcttcaccgtatttttttgtaatcttttctataccttctgttaataaatattttgtatatgacttttcattattggattgggcactatcttgaactgtctgcgctaatgtttgcactgaaaatggaacttctgtgttgaaacaactttgactgcctgtatgacatgttggtccatttggtatgacatcaattaaaatagtgtcattgtcgcaatctacatgaatatctttaacacgttgcgtatgaccagatgtttcaccttttgtccatagccgttgtttcgaccgcgaatagaaacataccacaccatcttctatcgttttatcaaaagcttcttggttcatataacccaacatcaatacttgttttgtttgattatcttgtaaaattgctggcactaaacctttgctaaaatcaattttgtaattggtcatcttactgctatacccccttgccgtatcacttctttaatagattgaaccgtcgtttctcgatcatgtaatatacttgcagctaaacctgcagaaacatccgtctgatcaaataattctacaaagtgttgtgcattgccaccaccaccagaagcaatgattggaatatttacaagagacttaatatttgctaggtgttcaatatcaaatccttgcttcataccatcatgtcccatacttgtaacgaggagctcacctgcacctaactgttctacttgctgtacccagtcatatactttaatatttgtcatctttttaccaccatgcgtacaacaataatgtgcttttctttcaggatcataatagctatcaattgctatacagatgcattgtctaccgaatttatcactcgcttgtttaatgagctgtggattttttaaagcacttgaatttaaagatactttatctgcaccatgatttaacaattgggtaatatcatcgagactttgaatcccacctcctacagtaagagggataaacaagcgtgacgctgtctgttcaatcacttctagcattaagctatgaccctcttccgtcttagagatgtctaaaaatactaattcatcagcacccgcttcattgtaatacattgctaaatcaacaggattccctatatcccttaatcctttaaattgaatccctttaacgacacgaccatctttgacatctaaacatggaatgatacgttttttaatcattttagcccctcccaaaaagatgcttgatgtgcagcctttcctataatagcagcgtgaacatttagcgacgctaatcgttgaatatcttgctgatgtctaataccaccggaagcaatgacaggaatcgtcgttgcctttactaattgaccagttaattcaaagttaggtccggacattttgccatctttagcaatatcagtatatataatgccgccaagaggtatatccgataaccgtctcacaaaactaaataaatttaactctgtgtcctcttcccatccgttcactttaatatcttctccataggcatcaacagataaataaatgcgacctggaaatgtatgtgccatctctttaagccaatcagtatcttgaatacctttcgttccaactatgcaataattaattcctgcagcaaagtagtccatgatttgtgacttcgtacgaatgccaccacctacttcaatatctttggttgttaatctcctcaatgacttaatataatcaaactctcgggcatgctgtgccttagcacctatcaagtcaacgatatgaatacgattcacacattcaaattgactatagtaagcgatactttcctcagccgagcgtgacattttttcttcactatcatatttaccctctgttaacctcacacttgttgacccaatcaaatcaatcgctggccataattcaatcatttataaatcccccttgtattgcctgacgcaaaatttgtaacccatatgtaccgcttttttcaggatggaattgaataccaatataattgttaaattgaacaattgccggaatatcagccccatactgcgcatatgcaatgacattttctgacatcggcgcttgataagaatgtacgaaataaacatcttgatttaacatagggtgcttactcactaaattattccagcctaagtgtggcactgggtattctgtttggatacgcgaaatatttcctgggataaaccctaatccagatgcatcgccttcatcactatgctcatacattaattgcatgcctaaacaaataccaatcatcttcttatcagtattcttagccaatattgcattgagatttaatcgttttatctctgacatcgcatctttaaaatggccgacaccgggcaatatgattgtttctgcttgatcgattatttttgaggtatttgagacaaccacctcataccctaaatgttcaatagcgcgttttacattactaatattccctaatccataatcaacgatgacaatcattcaatcacacctttcgatgacggcacacgctgatcatcagttgcagttagcgctatgcctaatgcacgggaaaacgctttgaatatagcttcaatttcatggtgtgtattacctccacgaattaaatcaatatgcgttgttaatcttgcattgattacgaccgctctaaaaaattcttctactaactccgtatcaaacgtaccaactttttctttacttaatgatgcattgaatgataggtatgggcgcccacttatatccacaacgacacgtgctaatgtttcatccattggaatgtacatcgttccataacgaacgaaatgctttttatctttaatcatttcaagtaacaattggccaatgacaatgccgatatcttcagttacatggtgatcatctacgtcaatatcaccttgtgcctcaatgtttaatgacagaccgctatgaaatgtaaacaatgttaacatatgatttaaaaagcccacacctgtattaatatgcgatggtgactggtcatctgatattgaaatatttagttgtgtttcagctgtgtttcgttgtttttgataaatcatattttgcactccattctttaacaatttcttctaattgctttaactgcgatgctgttgcaattgagtatcttacatagcccttcatcaccggctcaccataaaagcgaggtttaaatccttgttcatatacgtattgtcctaattgttgcgctgctgaacctttagtaagtacaaaattggcatttgatgggaatactgacattttatctgcaacatgtgtatcaaatatttgttttaactgctcagctaactgtcgttgcatcgttaaaaatactcttgtctcttctctatgtctaaaaatataagtcgcaatatttagcgtaaatatatttaatggatatggatgttctattttttgaatatgctttatcgttccagcagtactaattaagacacctaatcttaagccggcaattccaaacgcctttgataatgtacgcattcttaagatgtgtggtgccagttccacgtcatatgccgtaccataatctaaatatgcttcatcaatgacaaagtatccgtttaatgctttcatcttatctgcaatagctgttaaaaatgccgtatcaaattgcttgcctgaagggttatgtggattactcataataaaaaatgatggttgtacttcatcgattttcgttaaaatggtttccaaatcaaacgttaaatctgatcctgcatctacaaatgcaatttcacgatttacttgtgccgcatatgcttgatacataaaaaaatcaggatttagcgttaatgccggaccttctggcatgatcagcattaacttttgaatcaattcatcagatccatttcctgcaataatttgttcaggcgataatccgtaaaacttagcataagcttccttgaattgttcatatgctgcatcaggatataaattatatggcgttgcactaataatagacgtcattgttttttcatccaacggcgtaactggactttcatttttatcaatataaatcatttcaattacactcccctaagactgacgtattaaaatagactgctggtgattgtataatgcttcaacatgagcaatatgttgtgctgaatcagcaatttgttcaaacgtatcttttgataaatggatgaccgtgttccgtgttaagaaatcattgaccgataacccattggtaaatctagctgttctatttgtaggtaatacatgacttggacctgcaacgtaatctcctatgacctctggcgaataatgtccaataaacaatgcacccacatatttcactttttcaatatatggttgaggatttactgtttgaatcgacgcatgttcaggcgcgattgtattcatgacatggcatgcttcatcaaaattactagcatggataagatagtgttgattagcgatacttttagaaacaatgtcgtatctgtccacattaggcaatgctttagcaatacgtgattctaaatctttaaggacttgcgcatcttcactaatgacatatgtacgtgctaattcatcatgttctgcttgcgcaaatacatcatatacgatggcatctaaatctgcggtgtcgtcaataatcagtgctatttctgttggtcctgcaatttgatcaatacctacctgtccaaataaatattttttggcatatgcaacaaattggttacctggacctacaatcttatcaactttaggtatcgtttctgtgccataagtcaatgcagcaatactttgagcaccaccaacttgaaacacttgattaacttgcgtaatataacatgcagctaatacctcttgggatactccgttaggttgaggtggtgtcacaacaacaatattttctacacctgctacttgtgctaaagtcgctgtcattagaaccgttgatggataacttgctttgccaccaggcacataaatacccacactttctagtggatggtatatttcataacactccactgattcttctaactgttgattcgtctgtttaatactttcttgatatgctttaattctttcataactttgttgtaatgcttgttttgttttttcatctaatgtgtcaaatgctgctttaatttgttcatgactaatttctaaatgatctgttttcgtatgatcgaatgttagattatacattttcaaagccttatctccatgaactttaacttcctgacaaatatcgcgaataattggatacaatgactcatctaatggtgcttctaatgaaaattgatttaaaaattgttgtgcattaagcattggcaatagacacctccaaagagcgaataaattgctctattaattgtgattttttaaaataagctgctttattagttattaatcttgcattgatatcactaatatgttgcttttcaaccagtccgttcgcttttagcgtagtacctgtttgaacgatgtcgacaattccgtctaccatatctacgacacaagctaattcaacagaaccattcaatttaatcaattcgacatcaataccttttgatttaaaatatgtttcagcagtatgaacataactcgttgcgattttacgataattggtcgtttcaggtttcgctgcaaccgcaaaatgacatactccaaaaggcatattcaacaaattattaacattatattggcgctcatctaatatgtcgctaccaacaatgcctatgtcggccattccttgttccacataaattggcacgtcacttccttttactaaaatgcattcaatattatctacacttaataataattggcgttctctattttttaatgtttctgataatttcgtatattcaattacatctaaatagttaattaaactatccattagacgtcctttggctatggcgattcttaacattgtgcatactcccttacttaaagtgttaatcctaatccaaacccttcgatgcttcctttgtaataaccacctgttaaaactcgagattcattttcagcaaaatgacattgaataaataaacctgtgtaataggatctaggtggctgcgcagtaatatctaaatggatgtctttataaccttgtgtatgtaaccaacgtttccatatttttaattcaacgagtgctggatggtcatttggaatatagtgttccaatacatttaattgttgttgcgtattctctttcaagatttgcacgattggatgttcagtcgacaaatatgtaaccagtcccgataaattacgttcctcaatcattgatagtatgtctggtgtttgtaatgatttatcgagtaaggcatcaagcaattgataatgtcccaatacaacaaaatgcacgttgtctctcaactgctgttgaataaactgaataaatagctttaagctctgttgtacattcgctaatgatggtgcatagttttccaaacccacttgtacagccgcttcattattccgaatgattaaacctgtgtatgccacttttgttgctgcagttggatacattgagtaataacgcaataattgatctgtaaaatcatttcgaagtgcataaatttgatgctcatgttgccaaaaatttcgctcacccatctgctgcaaatcctcatggttcaattgtttccagtccaacttttcaaccacactaaaatcaactaactcataatccgctttattaaaatattttaaaaatgctgtttccgattcttttaacgcaattaattgttctgaattattcactcgaccaccctttactttcaatactgtatttaaaatcacttggtattttcgttgttaactttacttctctaccatgctaaagtgtaatatgattaataacttatcatttttagcaatacattacaacctttttcagaaaattcggtgtattggttttaaatttttacaaaagaaaaaggcaagacatttgtgcctataaaaatgcttaaccaagatttttatattgaagttgtacttcttgcacatattgtccttgccttattatgtaaagttattttctttctatctttttattaaatttaactattcttcataatcccgattacctttaaagaattgtctatcttgtttactatatacattttcaggattaaaaaacggtttgagtttatatttaaattcaaataagtttagaccatcaatcgcaaccctatcttggtaaacgttcgttgctgatatatctgtaaaattgtttggaccgacacctgcaataaacttaaactctgcttcatctaccaaataatcatacgcttgtgtatgtctatcctgtgcgccatgtggaaatacaaacatatctgttttacctacaattggttcaacttcatctttccatcttttagtatcacgtttaataccttctaaagatgttttttcaaaattaatgtgaccatatgaatgactcgcaaatgaccatccatcccgtttcattgcgcgaacaacttcctcagctgcctttttattctttgtataatctttactcgttaattcattcgtgcgataacctaatacgccctcataaccggttaaagcaacaacacccttttcaccatttaaagaaaaatctggatgctcttttacaaatttatttaaaattggcacgatatcattgtcatcagaataagtagcatggccttttgagtctgtcgtttcagatacaacatgtttatttttatcgagtactaaacggtcagcataaccatggtgtctcatgtaactatagtaattcatatcatcaattgagatgattagtggctttttacctttcggcaattttatttttttggcttttacatgatgagatgataagtcgtatacatcatgtggattaacgatgatgtaattatttttatataattcgttcaatgattttttaaattcacttacagtaatcatccaatcattgttgcccttagcttggtgtgtatctcctgtaaacgcaacttttggttctgtaattaatgggtgataaaacacatgataaacttggccgtgatatgtttcccaatgttcatccattttcgatttatgctttgcatactcatttggattaacagatttattttgagctttctcattttgcttggaacagctatatagcaatgcaactgataataacagaaaaaatagcaataaatattttttatgcattaaacattctccctatgttttattatgcacaattataacatttttattatgtggctcataactttttaagaaactgttgggattttaattttattttttagataatgtcatagtattttatttataaaacacaatatctccttgattgataatgtcgtccatagctttgtctcgcttgaatttaagcctttctgctaaatttattgaacgttggttacacttatttgtcctgataacttttactgtttcttgatcgatataattcacaaaatttgtgattgctgtaatagcctcacatgcgtacccttgtccttcaaaacttggatgtaatttataaaataaatttaatactgtttcttgctttaattgtcgatattcatatccacaaataccaataacactacaatctattttttttaccaatacaaagtaaccaaattgatattgttgccaatggtttcgccatttttcaatccaccgttgtgtgtctaatttggaattatgtaaacctttgggagtgtatatatttgcttgtggatgactacaaatattataaagttcaattaaatgcgaggaacttggaatcattaaatttaatctttcagtatttatcattaaatgtctccctcctatttctatttaaagactatttatatgaatgctaataccacgggttgaaatatcgactattatttaaaaagaataatgtaactactaacatcagaagtattaacgtcaaacacaaaacaacataatcatctttttttaattgttttttgacgtaccaggttctccttttatactgtccgaattgtcttaactccatagcagtactaatagtgtcaattctttcgatactagaaaatattaaaggtaacacaatgcgtttgatacctttaacacggctagtaaatttcgcctttttcgaattatcatatcctcttgcttgttgcgcttgtgaaatattaaaatatgtttcttgaatatctggaatataccttaatgctagtgagactgcgtaactgattttataattcacacctagctgatttaaacttgcagcaaaatgactcggattcgttgtgaataaaaatattaacgctaaaggaactgtactaatatattttaatattagattaaaaagatagaataattcctgtgatgttagcgtaaatcgaccaataccattgattaactctgtacgctgattataaatcttcacaccatattcaggatcaaatatgtatacggcaataatatttaatattgtgaaaaacagaatgaatttaacaacaaaacgaacttgtttccattcaatatgagcatatttgaacaataaaatagatgaaacactaattaaaattaaatatcttgtgtcataagtcaccattgcagaaatagaaacaactaataagaataaaagtttaacagtcgcatttaattgatgaatacgactatttcccgggtgaaaacctatagtattatattgattcattggcgtctcaccttcctatcatggttaataaataattgtactaatttctgtggctcgctaatccctatatattcggccatttcaaatagcgatgtttgtctcaatgatgcaatctcacagatttttttatcatttaaaaccaatactggcgtggtatcagcaacgacttgaccttttgataatacaactgttcttgaactatactcagacaataaatgcatatcatgcgtaatcataataatcgtcttcccttgtctgtttagctcaattaaaaatgacattatctcattataatgatagaaatcttgaccagcagtcggttcatccaatatgattatttccggatttaagactaaaacagatgctatagtgaccctctttttttgaccatagcttaaagctacaattggccaattccgaaatgcataaagtccgcatattttgagcacattctctacccgtatctttatatctgattctttcatacctcgtgctcttaaccctaatgctacttcatcgtaaatcattttttcggaaatcatatgatttggattttgcatcacataacctacgaattcagatcgttcgctaattgacaattgattaaatcccctattacaaaattggatattacctgttatatctaaaaatccacaaattgctttagcaagtgttgatttgccggcaccattgtgaccaactatactaagcatttctcttctataaacatttaattgaacattattaagtacactattactatagtcactatattgaacacatacctcatttaattctaatagcggttcagatttgtacttattatcattatttgcagatgtttcatctatccattttttcactttaaatttaacatgttcactcatacaaacgtcacgtaaattcgctaagttatcaatggattcgacatctacttctgcatatttaagcgctgtacagtataatggttcacgtatgcctgcttctttaagcttagatgattttagcaaatcactaggcgttgtattagcgatgatttttccatctttaaaaagaagaactctatcaaacgtatcatctaatgattcttctaatcgatgttcgacaataatcatcgttgactttgtttcttcatgaatattgtttaacaatctcagcgtttcatgtcctgtcgcaggatctaaattggccagtagctcatccaatattaaaataggcgtacgatggattaatataccacctaatgaaacgcgttgtttttgacctccagataaatcttgcggtcggtgatttaaatgttctatcatgccaactttttcagcccaataacttacatttttcttcatatcatcttgttcaacacaattattttctaataaaaaggccatatcttcagctgctgttaagcctatgaactgtccatctgtatcttgtaaaactgtaccaacaacattagatctatcatgtaaacaactaacggttgcatcttgattatttatatatagttccccggttatgttacctttagttttaaatggaattaatccgtttatgcaatttgcaaaagtcgatttaccactacctgaagcaccaactactagcactttttctcctggataaatatcaacatttatattctgtaatgtaggtgttgcttgactatgatattgaaaactaaagtctttgaacgagataattggttcagtcatgatatatcattacctttctacattcatttacatatctgattcaacaaaatgattattctttacgtaaactacctttttttatttgagatgaagcatatgcttttaataatattgtcccaataatgccaactgaaataatatttaatactgcagagataacaccttgtgtataaaccttgttagccggttcgttataaatcaaaatatctaatgttggtgcaataagtgcccagcaaataatattcgcaataatttgaccgatattaaaataaatcatcgatttcctagaaaatcggcctgaagaaagatttaattttaggccaatccatccatataaacagcctataattcctgaacaaataacccaactccaccaagcactaccgtatgtcgtgaaatctttaatagcgtgtccaactaatccagtcattaaaccagcaaaaggcccaaatattgcagatattaatgctaaaaatgcataagatgtttctatattcgtattaggaaaacctgttggtattacaacaaaacgccctaaaatcacaaataccgctgctcctataccaatcgcaacaacagttttaactgaaatatcttgttttttcatcttcattactccttacataaaaaattcattaaattgatggtgctttagataaatgaatcgtccaatcatttccagtaccaatatgatataaatctgaaaatgagtcttgattgaccgctacaccaatatttactagcgagttaacatacacaagaggttcacccacattaacatctgcaaacgatcgcgcaaatttaataatattttgatagactttcttatcttgatgataaattgttaccaccaaattattaccatgaacaatttccaaggattttaagaatgccaatggaatatttgtccataatgacccaaatctgatatctaaaatatcaatgcttcctgtaacagaatcctcattttttgtcgcttctcttatttctaatgcctcaatactatcaacattaattgcctgaccgagacgttcaaacgctatcttatttgcagctaatctcgcaccattgtatgcataaacatctctaccatgaaaagtatgactttcttccgaatgaggcaatcggcttttcacttcatcaatttcgataacttttttaataccttcgtaatgtttaatatgacttaaagaaccattatcaggtgtaataatgtaatgacctgaatatgttaagcaagcaatgctccgcctatcactacctacacccgggtctaccactgatacaaaaactgtgcctttaggccagtattttacagtttgatataaacgatatgacgctacccaaatgtcatacggtggtatatcatgcgttaagttttcaacacgtatatcatcacttacagtatatgcaactccatacattgcacttacagcgccatcactaagtccaaaatctgattgcaataccaaataatttcccataaaatgcctcctttttttaaaacttcaaaaaaatattatctacatatttaatgttctgtattttgaattttcagaattatattaaaatagtacgagtcacttgatgcaaagtcaatagtagtgactataaaaatgataataatagtcagatttatctcattaactaaatttcacggacttgtaataacttctttatgtttgaattaattgactagggtataacaatagtgtggtgttttataggtcattctttaaatacatcacagaaaatattcgaattcgaaataaaatgcttgcatctttgttttttaggtggtattgtatgtatatcaagtataaaaaatatatctaagagataaaaatatggaggttttatattatgactaactttacttttgatggtgcacacagtagtttagaattccaaattaaacatttaatggtttctaaagtgaaaggttcatttgatcaatttgatgtagctgttgaaggagatattaatgacttcagtactttgaaagctactgcaacaattattccaagctcaattaacactaaaaacgaagcacgtgataaccacttaaaatctggtgatttctttggtactgacgaatttgataaaattacatttgtgacaaaatcagtatctgaaagcaaagttgttggtgatttaacaattaaaggcatcactaacgaagaaacattcgatgttgaattcaacggagtaagtaaaaatccaatggatggttctcaagtaacaggtgttattgttactggtacaatcaatagagaaaactacggcattaactttaaccaagcacttgaaactggtggcgtaatgctaggcaaagatgttaaattcgaagcatcagctgaattttcaatctcagaataatctcattacacaatcctcattgttttaatatatatacgaaatgccaactatatcatccctaggtatagttggcattttttaacttctaaattaaaaatcatatttaacttaattgataataacaccataaagtaacaatgatattgatgaaattaaaagtaatacactagataaaatatctagccttttatcttttttatcccttattctatttgtcaaaagtgctccaactgcaactaaaactagtattgtacaaaaaatataaatagccaaaataaacaactccttattaaattggcattggcttcattagaaataatcaagaaaattcttctttatactttcttatattaaatattgcctatttacgttatacaaaacttcattttacaaattgaagcaaattatatttaacttctaacttaaaaatcgctaagatttaaacttatatttagacgcctttcattcaggtaggtcttattgaaactgaaaactttgatgaccttttgcaaagccattaactgtataaagcatagatcctccgcccatttctatatcattggaacaaatgatgagttgatttgttccaggtataaattgcggatgagtagaacgtaacatatgcccttcatctcggcctggtatcaatatttgtcctattggataaccccttttattaaaaactaacactcgaccttgaccatacattgctacgtataaattatcgtcactatcaatacaacatgagtctggtccttcatgacctgtaaaatagtacggtatagtagctccaaatggttgtatcgtcacaccatcatcttcaagtgcaatgcgatgtaatcgattggctgtagtttctgttacccatagtactttttcatctgtacttaaagcaataccatttgctacgctaatattttgaatgataggcgtcactgttctaaagtccggcgaaacataataaacgcctcctagtggattggtagagtatcctctaaaatctgtaaaataaaatccacctttagaatcaaataccatgtcatcaatacaatatgctgttgaaagatcttcaataatatcttgtaagttgtcaccattttctgtagctgcaaaaatgcctcctgtagatttaaaatctcctaaataacaaacgaataatcggccatctttatgtattttgattgctgcaggattcgctttgtgacttacaaaaggtcgtttgatttccttcgtttcaggattgattttgaaaatattgccttcgaatacatccaataaaaagagttgtccctgccgatcaaagttcaatccttctagttgcaatccttttttggaaatttcaagccatggttcagctgtaattgtttgtaattcactttcagatataattggaacagcactattggacttcccgctataaaataatgtaggtaaatcttgttgtgacatcatgatcattcctttcatttcattcgttttaactatcaattttattttaaacaagataactatcaaataaaatgataacggtttcatctatctattttatcggtctagtggctgatttcaagctagaaatattgaatgacaatacaactctgttaaaatgatggacgtagataaatatgcgtattgacgctttattttaaaaattaacatgcttataacatgtttatagaaggagattaacctatgaactatcaagttcttttatattataaatatacgacgattgatgaccctgaacagtttgctcaggatcacttagcgttttgcaaagcacaccatttaaaaggtagaattcttgtttctacagaaggtattaacggcacattatctggtacaaaagaagaaaccgaacaatatatggcacatatgcatgccgatgaacgattcaaagatatggtgtttaaaattgatgaagctgaaggacatgcttttaagaaaatgcatgtacgtcctcgaaaagaaatcgttgctttagatttagaagatgacgtcgatccaagacacacaactggccaatatttatcacctgtagaatttagaaaagctcttgaagatgatgacacagtcattattgatgcacgtaatgattatgaatttgatttaggtcatttccgaggtgcaattcgtccaaatatcacgcgttttagagatttgcctgactggattaaagagaataaagcgttatttgcagataaaaaagtggttacgtactgtactggtggcattcgatgcgaaaaattttctggatggcttttaaaagaaggtttcgaagatgtagctcaacttcatggcggtattgctacatatggtaaagatcctgaaacaaaaggtgaatattgggacggtaaaatgtacgtatttgatgaccgtatcagtgttgatatcaaccaagttgaaaaaacaattattggtaaggattggtttgatggcaaaccatgtgaacgttatattaattgcgctaacccagaatgtaataaacaaatattagtttctgaagaaaacgaaactaaatatttaggtgcatgctcttatgaatgtgctaaacatgagcgtaatcgttatgttcaagcaaataatattagtgataatgagtggcaacaacgtttaacaaactttgatgatttacatcaacatgcttagttttaattaaatacctttcaaaacacgctttgaaaatccgatttataaaggtttttcaaggctgttttttatgcgcatacataacctgatatgtttttaattatgcgcgtgttatactaaattaaattttaatactgcggggtgtcttaaaatgcacattttagtaacagggtttgcgccttttgacaatcaaaatatcaatccctcatgggaagctgtgactcaactagaagatattattggcacacatacaatcgataaattaaaactaccaacctcttttaagaaagtagataatattataaataaaacgttggcatctaatcattatgatgttgtactagctataggacaagctggtggtagaaatgccattaccccagaacgtgtcgccattaatattgatgatgcacgtattccagataatgatgattttcaacctattgatcaagccattcacttagacggtgcgccagcttatttttcaaatttaccagttaaagcaatgactcaaagtattattaatcaaggacttcctggagcactttcaaatagcgcaggtacatttgtttgtaatcacacactttatcacttaggttatttacaagataagcattaccctcacctacgattcggatttattcatgtgccatacataccagagcaggtcattcgtaaacccgatacaccatctatgccattagaaaagatagttgcaggtttgactgcagccattgaagctatttctaatgatgaggatttacacctagccctgggcacaacggaatagttataagtacaccaataaaatacattccttaaatgactaacaactttgttaatagggtaatgcttacggaagtatgttttatttatgggggaggaattaataatgactacaaaaacagtatttgatgtcattgatatggggttaggatatttagtaaatgtgtatgatgcttggaaagttgaaaaggtacttgatgattatcataagcctttttctaataccattcattggcaatttgggcatgtattaacaatttttgaatcggccttagctgttgctggtaaagagaatattgatttaaatatctatagacctttattcggaaatggttcgtctccagatgaatggaaggatgaagtaccgagtattgaaaagattttagaaggtctccaaacattacctgaacgtgcacgaaatctaactgaagatgatttagcaattgaattgaaacaaccaattgtcggttgtaataacttagaagagttattagtattaaatgccattcacatcccacttcatgctggtaaaattgaagagatgtctcgtatattaaaaaatttaaaataaatatgtgcttattaaccgttaacaacacgttaacgggttttttatttgtttaaaaggtcacttttttaaatttaataaataccatctataccagttcttcaccgattctcgaaaaataattatattaatgatttcgttaatttaattttatatttaattattactgtacatcttttgtagttagctttattcttaaattgaaatatgtataaaacatagaaagaaggacgttttaacatggaaaacacggttaaatatcgtaagtttatactccctatcgttgtaggtctccttatttgggcacttacaccttttaaaccggatgctgtggatccaacagcatggtatatgttcgcaatattcgtcgcgacaatcattgcttgtattacacaaccgatgccaattggggccgtctctataattggatttacaatcatggtactcgttggcattgttgacatgaaaacggctgtcgctggttttggtaataatagcatttggttaattgctatggcatttttcatttcgagaggatttgtgaaaacaggtcttggtagacggatcgcacttcatttcgtcaaattatttggtaaaaaaacattaggattagcatattctatcgtcggtgtagatttaattctagcgcctgctacaccaagtaataccgcgcgtgctggtggaatcatgttcccaattatcaaatcactttctgaatcatttggttcgaaaccgaaagacggatcagcacgcaaaatgggtgcatttcttgttttcacagaattccaaggtaatttaattactgcagctatgtttttaactgcaatggccggtaacccccttgcacaaaatttagcatctagcacatctaatgttcacattacatggatgaattggttcctagctgctttagttcctggacttgtttccttaattgttgtaccttttattatttataaaatttatccaccaactgttaaagaaacaccaaatgctaagagttgggctgaaaatgaattagcgactatgggtaaaatcgctttagctgaaaaatttatgattggtatttttgtcattgctctaacattatggattgtcggaagtttcattcatattgatgcaactttaacggcctttattgcgctagcattgttattattgacaggcgtcttaacatggcaagacattttaaacgaaacaggtgcttggaacacattagtatggttctcagtattagtgttaatggccgaccaattaaacaagcttggatttattccttggttaagtaaatccattgctacaaatcttggtggcttaagctggcctatagtcctggtcattttaatattgttctacttctattcacattacttatttgcaagttctacagcacatatcagtgcgatgtatgcagcattactaggcgttgccatcgcagccggtgcaccaccattattcagtgcattaatgttaggtttcttcggtaacctattagcttcaacaacacactatagtagtggtccagcgccgattctattctcttcaggttacgtgactcaaaaacgttggtggacaatgaacttaatattaggtttcgtctactttattatctggattggtttaggatcactttggatgaaagtaattggtatattttaaaatatttaaattagcgctcgaatctcattgatttgggcgctttttaatttgtatttaaaatcaacctttgctaaatcaagactccctttttaaaatacgtttatcctttaaatcattgcgtgcttcactgaaaatttgtataaagatttaagtcattacgtaacatcacataaaatacatttctatactattccgtttcattgatcaacattacgtatgccctcataaatcatgaaattaaaaacaccttcgtttaaattcattttaagtgcgaattcaacgaaagtgatttatttcatatttaatgtttcaaatttatacagctgtcactgttactgcacacatacctcagtctcaccttatcatgacacaaaggatattgaaaacacgtataattatctttcctcgtattttatagggtttttgcgaccggatgtttcttcaatttaatgtattgagaaagactatataacacaatacctgtccaaataaatataaacgtaattaattgatctatactaaaaggctctttgaaaacaaatatgccgagtacaaacattattgttggtccaacgtattgaataaatcctattaacgaaagtggaatacgttttgccccggctgagaataggattagtggtattgccgtaatagcaccagaaaataacaaccaaaatgatgacatgttcaatccaaatgacatctgatgttgctgccataaataaataacgtatattagtccagcaggtgcggtaacaatacattcaatcgtaatactgctgatggcatcaatatgtactacttttttcaataatccgtatgtaccaaaggataacgctaatataatagaaacgattgggaattctccaatcttgagcgtcatatataatacaccgatgaatgcgaataaaatggctagccattcaaatttattgaatctttcttttaaaaagataagtgctagcaaaatgctaacaagtggatttatataataacctaaacttgtttgtaggacgtgaccattcgttacagcccaaataaatgtaccccaatttaatgtaatgacatagcctgctacgacaatcgctaatagctgaatgggcttgcctaacaattgattcatatctagttgaaatgcattgcgttgtttttgtccaaccgcgagtatgaaaatcatgaatattgctgaaaatataatacgaaaggctaaaatttcaaatgcgcctattgcatcaacgaactgccaatatataggtagtatgccccacagaatgtatgcactaagtgctaaaaatataccttttttatattctgtattcacttacatacctccttactctcccaaatttttaacatgttacgctcacttggttatgctaatataacgattttactaataatatttcgataaagatatcattttgtttatatttcccacatttattcaccaaccactaaacaatattaattttataaataattctgtacaaatcagggtatattgccagaaagactaccatacaacataaaggatggatacaaatgactttacctaaaattggaaagcctgcaacacgcgcgctaaattcacaaggtatatacacattagaagcagtatcacaatatacgaagtcatctctaatggagatgcatggcgttggtcctaaagctatatcaatattggaacaagctttatttcagcaccagctacattttaaaacggaagttcagtcatcattaccttttaagttaacaggagatgtgtcatgcaatcatgcgcctaaacgtcaacaaatgatagattttatagttgctacagcagcattagatattgaattattacgttcactggttacaacagaatttatttggtctgtgcctggacactttgacatttatggacctcaaattttaattcaagaactatctaactattacaatcaggttgctagtctcaatatccactccaacatcacacatgggtgcttaggttccatgcatggtattgaaatattaaaaactggtaaagagattcattttgctcatttttttgaatttgaaaatcataaaaaggatgccaagttaagcaaagtgacatcttacattgttgttgattaatgtatcaaattatatatatcgcaaaaaattcttttgcggttacatgtatatttttatataacaaataattttgtataacatttttgttatatgaacacttattactagagtgcacattgaacatacagtatgattaaatatcatgttatgaaagaaggatatattttgactgtttttaaaaatcagcgtttaagctggttaccatacatagctattgtcattttgttacatgttattgggtttagttttttatggattgctggaaaagaccatcatatcttatttggtatggggattcttgcatatacattaggtttgcgtcatgcatttgatgcagatcatatcgccgcgatagataatacggttcgcaaattattacagcaacgcaaagatccatctggtgtgggtttctatttttcaattggacattcatctgtcgtatttttaatggctgtttttttaggggtatctgtaaaatgggctaaagatgaattaccgcatttccaagatattggtggaacgattggtacactagtttcaggtttctttttagtgcttatcggtgtgttgaatctaattattttaatctctttaattaacttgttcgctaaattacgtcgtgaacacattgaagaagctgaagtcgatgcattacttgaatctagaggattggtttctcgatttgtaggaccttatttcaaattaatcacgcgtagttggcacgtattgccacttggctttttatttggacttggttttgatacagctagtgaaattgcgttactcgctctttcttcaggcgcatcacaacaagccatttcatttatcggaatcttatctttaccaattttattcgcatcaggtatgagtttattggatacattagatggtgttgtaatgaagtatgcctataattgggcattcttcaatcctattcgcaaaatctattacaatataacgattactgcgatatcagtcatggcagcattagtgattgggatgattgaattgctacaaattcttgctgataaactagacttacatggtacattttgggcatttattagttcaatcgaatttgattatttaggctatattttagttgcattatttttaattacttggcttatttcaagtttaatttggaagtttggtcgcatagaacacaaatggtctaaataaagtaacttgtcttgcaactacctttgtattgttgcatttttagacaccctgcacacttcttccattatgctacgctctcagtagtcatctttaaatcgtttcttttagagatgacttcattttgagagcgtatttttctatttaaaatgtatttatccaaaattcaatgctttcgaatttaaaatttcagtatttctgtttaaaatttaattataatctttaatacaggaggcgctatgcttatgaatattgcgaagttagagaattatttacaaattgattcatctcgttataatcgaccgagtattgaagcattaaattattatgcaacacgttttatgttaactgtaccttttgaaaatattgatgttcaaaatagtaagcctatatctataaatatcgatgcactttttaataaaattgttcatgataaacgtggtggtttttgttatgagttaaatacatttttcaaagcctatttacaacaaaaaggatttaatcctgcattaatgtcagctactattcacacacccggtggcggtcgtagtctgaacggttcacatgcttcacttgttgtttctataaatgatgtattctatgtaactgatgttggctttggagacttacctctacatgccattcctattacttcatctgagcatacacaaccaattactgatatcagtggtacattccgcgctatttttaacaacgaagacaaggatattttctatgttcaaaaattcgaaaatgatcattggcatacaaaatatgaagctgaattcaaacctaaacaaatagaagattttaatagcaacatcgaatataatcaaacgcatccagattcaatatttgtacagcatttattaattacaatgccacaatcatttggccgtgctacaatgtctgaaaatcatttaactttaacaaggaatggtagctcagaaaaatttgatgtcactaaagataactataaacattttttagaaaaatattttggactaaatgtaactattaatcgtattgaaaaacaataatagtaaaatataaaaatatgggcgtatcttacttattgtaggtagcgccccttttttatgcttcataaacacaacaaaaaggatatgacacaaacttcatgtcacacccttcttttgaaccgcttcattttacttaagcaagtgcatctacaacataaatgacacctacgaatacaaatgcaatagcaatcatcgtcgaaataaagacgatacccattaatggattaaataataaaatgacaccgaaaacaatacctaataaattaaaaatcactgaaattagttttaagctaccactacccgtaaacgtaaataatcctgcaatagaactaaaaataaaccagaatgcaaacatgtagataaaaaatgccgagctagcgccaacattaaaaatgacaataagaccaaagagaatatctacaatccccataaacagaatccaattttggttaccacctactaaagcttttgcttttctacggtaaatgatttgaatcacaccgttaattaatacaaacagtccaatcaaccaggtaatagcataaaaattttcaattggaaatgtaaaaataacgactgccaacattaataataatacacccattattaaactagaccatttaataccttggtttccttttgccataacaatcaattcctttcaaataaagccctcttttaatttttacaaaaaatttattatacaataattaaattcccttttctcaatttacacaaacatcatcacttagaaagcaccattgcttttgtctaatatgtacgatgaatctatatcctcactcaaaaatctactacgtagcgatagctttcaactctgtaaggttcaaacattgaattgtaagtttagataaaggctactactccaaacattatttaaaatgaaattaaatacaaaaggagtgagactatgacaatattatcagtgcaacatgtttcaaaaacatacggtaaaaagcacacatttcaagcacttaaagatattaactttgacatacaaaaaggcgaattcgttgcgattatggggccttctggatcaggtaagacaaccttattaaatgtactaagttcaattgaccaaatttctagcggtagcgtgattgctaacggacaagagcttaataaacttaatcaaaaagcacttgccaaattccgcaaagaatcattaggtttcatcttccaagattacagtattctgccgacattaaccgttaaagaaaacattatgttacctttatctgttcaaaaaatgtcgaaggcaacaatggaagaaaattataaagcgatcacgacaccattaggtatttatgacctaggaaataaataccctagcgaattatctggtggtcaacaacaaagaactgcagcagcgagagcatttgttcacaaaccacaaatcatatttgcagatgagccaacaggcgcactcgactcgaaaagtgcaaatgacctattacaacgtttggaagaaatgaataaatcgtttgatacaactattgtcatggttacacatgatccggttgcagcaagttttgcagaacgtgtcatcatgctaaaagatggccaaattcatacacaactttatcaggaaggacgttctaaacaggccttttatgaagacattgtacatcttcaatcagtattaggtggtgtctcaaatgacatttaaccatatcgttttcaaaaacttacgacaaaacttaaaacattatgcaatgtatttattttcattattttttagcatcgtcttatatttcagttttacaaccttacagtttactaaaggtgtaaataatgacgactcgatggccatcattaagaaaggtgctttagtcggatcaatatttttatttatcattattgtcatctttttaatgtatgccaatcatttattcgtaaaacgccgtacacgtgaatttgcgctatttcagttgattggtttaacacgacaaaacattttgaaaatgttagcacttgaacaaatgatcgtatttttaatcacaggtgttgtcggtgtattatgtggcattgcaggtgcacaattattgctttccatagtatctaaattgatgtcgttatcgattaacttatcgatacatttcgaacctatggcccttgttttaactattttcatgctaattattgcgtatgtactgattttatttcaaagtgctttatttctaaaaagacgtagtatcttatcaatgatgaaagattcaattaaaactgatgccacaactgctaaagtaacgactgcagaggttatttcaggcgtattaggtattgctatgattgcactaggctattatatggcgacagaaatgtttggtacgttcaaagcactaactatggctatgacatcaccgtttatcattttatttttaacggttgtaggcgcctatttattcttcagaagttccgtgtcacttatttttaaaacattgaaaaaatcaaaaaatggacgcgtatctattaccgatgttgtattcacatcgtctattatgtacagaatgaagaaaaatgccatgtctttaactatcattgcaattatttctgcagttacagtaactgtattgtgttttgcggcattatctaaatcaaatacagatcaaacccttacatctatggcaccaaatgaatttaacgtggtcgctactcaagatgctaaacaatttgaaactaaactaagccaacaacaaattacattttctaaaaatgcttacgaaactattactgtagataatgttaatgatcaggttattactttggaaaatggtagtgattcaggtcgcacgaattctattttaagtgcaaataacaagttaacaggcaacaatgccatcattacaaatacaaaatcgctgcctaacgtgattaatattcatttaaacaaagatttagtagtaaaaggtacaaagaatgagactttccgtgttacacaagaagacaaagacaaggtttatcctttaaatctaagcttcaactcacctgtcatcgaagtaagtcctgaaaagtatcagcagttgaaaacacaaaataacgttcatactttttatggatatgatattaaacaaacatcacaaaaggaaaaagctcaagcaattgcaaaacagtttggagacaaagtcatcacttatgatgaaatgaaaaaagaggtcgatgctactaacggtattctaatatttgttacatcatttttaggattagcatttttagtagcagctggatgtattatttatattaaacaaatggatgaaactgaggatgaactaagtaacttcagaatattaaaacgcataggctttacgcatacagatatgcttaagggattattattaaaaattactttcaacttcggtttaccattattgattgctatattacatgcagtattcgccgcaatagcatttatgaaattgatgggtaatatttccttcatgccggttattgtagtaattgttgtatacaccctcatttacattacttttgctttaattgcttttgtacattcaaacaaattgattaagaaaaccatttaacacttgtgattaaaagatgcttcattgagattttgattttaagcaatgcagtataactattaattgatttataaaaaaggagagattgaatcatgaaatttagagaattagtaaaacaatcatatgaggatttgaaaaatttgactgtaacttggtataacgtcattgctttaacaatacttgttattgtattaagctcattcacaacaccaatgataggcattccagctggtttattaggtggctcttattatttaaaacgtcgtgaagaaaaaggcaagtaagcacattccatcggtatagaacattgctatgacctttcaagtcagattttaatatcaacaagtagcgtttatcgctgcttgttttttatggattgcttataaaatcatcatgtttaaacgatatgtcactttgaaaactagcaaacaccataaaagactacaatttttttatttttataaacccctttaaatcaacgtttctaaggtttttaaaaatcttttttaatttattttcaaaaaacactgtacattatgccaatatgagcgtatagttggtcttacgtaataaaagctcgtgaattaaattgtagtgtatttgtttagaatatcctcttttttagttatgaatttgttacaaatattaagtgcaaaagcacatggaggttttctatatgaataacggtacagtaaaatggtttaacgcagaaaaaggttttggtttcatcgaacaagaaaatggcggagacgtattcgtacatttctcaggtatcgctagcgatggctacaaaactttagaagaaggtcaaaaagttactttcgaaatcactgaaggtcaacgtggagaccaagcagttaacgtacaaactgtttaatcttacaaaataaaacgactcattataaatgaatcgctttgattaccaacaaggttctaaatcttgttggtatttttttatgctattttggataatatgaggccataccgcgatcatttataaaaacttatttgccagatacatactaatcaaagctataagaatgattgcaccaacaaatgctatgaaagaaagtacacctgtttttatatttctagctttagtcgtttgtacttcactaggatcttttccattcataaaagcaacaattcgatcatagttatccattttatgcacttttttaaagtcttctattttcatagctgcataataacctattccataaatgactatcaccgttataccccaagcccaattccaataaacaattaaaggtcctgttaaaattgcagctaatgtcatgaaaataagcatcacatatgtccataagttaagacttcgttgcgctttaatatcaggtacaaatggaatggtcccttttactaaatcatctaaagttacattgaacaattcgcacatcattaataagttatgtatgtctggtaagcttttgtcattttcccaattagaaatactctgcctagatacatataacttttcagcaagatattcttgtgaataaccatctcgttccctatattttttaatttgtttactcagattcaattacatacgcctccattcaattagtacaatcattacaatcagactatcagataaagttaaatcaagtcacctgtatgattgactaaatgttttgacatacgacaacatcggggttcgaagactcccttaagacagacctgtataattacgcgcttgtaattttctcaatgccaacttgaatttcacttattaatgatgcaacttttccatgctattcaatacttgcgaagttagtcctatttaagagattacgttcacactatttactattcgattttccagctttccaactatgcttttctaatcttttttgtgctataaattctactgcttcaaaaatacatactgcactgatgaaccagcttaggaaaccaacaacaatgctaatcaaccacatgtgcgtcatatgtaacatcatccatgtaactaaaatacaaactaatacccctgtcataccaaacactgcgccacgacttacatgcacagcgactttatcaccatattgcatacctgtaataaacatagacactaaaaatactgccggaaacgttgcaaatataccgccaaattctttccaaggtagtgttacagatacaatataacttaataatactgcaaatccccccacaaaaaatttcattaatgttaatttcatgatgttctgcctccaataatttattacttaataactgaatacaactaattatcacgcattttccaaactataaatgtctaatactgaatattgcgagggaaataacaaaccaacaaacaaccgtgaatattgcgcctttccgataacctttatgcttaatgtagagagatgtcaaaaatacagttaatatacaagacagaataccgacaattgctccagtactaagattcatcgacatctccactaattgcgtaccacgatgatctaaagctaatgcgataatagccgcaagaaagactgccggcatagtagctataatacctcctaacttaccacctaccttatcagcaataattgaagctaatgcaacagcgataccaccaatgacaaaatgaagaattgcacttccaattgaaaacatcttcaacgtacctttctataattaattcaatacaaaacgtatcattcacacaaagtgtaaaacttaaattttctactgtaaaggcaactcaagcgatgttcataaagctttcatgatactttcataaactagcaataaagggttcaaatgaaagtatatccagctcaaattagggagtgggacagaaatgatattttcgcaaaatttatttcgtcgtcccaccccagcaaggttgactagaattgaaaaaagcttgttacaagcgcattttcgttcagtcaactactgccaatataacttcgtagagcatagaacattgatttatgtaccagcctgatcaacatataaatataaatttttatgtttcacgtaaaacaaaaaaaagacaaagctgttatgatcttagctttgtcttttatgtgttagtcatcatgtatacgacatcctactactaacgtttatatattcgaatttttatttcataataatcttcatgatctttgtctttatgctcaacatgtaatcctgtttgttgaatcgcttggatacttttgcctacctcatctcgtgcttgagtgacatcttgtgcaaagcgaaggttttgtgctttgactttttcgggccccgttttttggcgtactctatcttcagtctgtttcacatttagcttttgtgcaatgacttgctcaatcaacgcttcttgttcgctatcagacaatgataataccgctctcgcatggcgttcagtaattttaccttctcttaagcgaagtagtactttcggcgccaacttcaataaacgcaacttatttgcaataaagctttgacttttacctaaactttttgccaattcactttgcgttgtatcaccaatttccaataatttcttataggcttccgcttcttcaacaacagacaaattttctctttgaatattctcaattaatgcaacaacagccgtctcttcatcatccatatcacgaataataacgtctgcttgaggtaaatttagtgattgtattgctctaaatcggcgctctccagcaataatttcaaacatatcttcttcaatcggtcttacaacaataggttgtagtaaaccatgttcatgtattgattcagcaagttctttaattttatttggttcaaacacctgtcttggttgataacggttgggaacgatacgttcaatttgaatggattcaacattactattgcgatcttcttcaatatgtccaatgatgtcatctttgtttttcaaaccaaataattttgaaaaaggttttttcattatccattcgctccttttatgttagttgtaaaggattatgcattatttttcaagtaaaggagtcttattaggcgtccctggttttcttggatactttttcggcgtctgtctttttttatcaataatgaacatctggcgctctccagcatcttctggcaattcgaaagtatgtgtttctgtaacattaccacctaacacactaattgcaaattttgcttcttctaattcttcttcaccttttgaagattttaatgcaacaaactgtccaccttttttaactagcggtaaacacaattcacttaacacggataatctagctactgctcttgcagtaacaacatcataagactccctgtagacacccttaccaaatgtttctgctctatcgtgtataaagctgatatcctgtaattgtaattctgacgctaaatggtttaaaaattgaatacgcttatttaatgaatcaacaatcgtcacttttaactgcggaaacattatttttaacggaatacttggaaaaccagctccagcgcctacatcacatatacttataggctgattaaaatcaaaataaaaactaggtgcaatggaatcataaaaatgtttcaaatatacatcgtgttcatctgtaatacttgtcaaattcatcttttcattccattcaacaagtaaacgataatatgtttgaaactgttgtttttgagtctcagttaattgaatattatgttcttttaattgttctgctaaccattctacagtcattagtcactcaccctttggagtttaccttgttctaagtaaatcaataatatagatatgtctgctggatttacccctgatattctagaagcttgtgcaatatttaaaggttttacttctgataatttttctcgcgcttcagtcgccaaactatcaatcttactataatctaagtcttctggaattttcttctcttccatacgcttaactttctcaacttgttgtagtgatttattgatataaccttcatattttgtttgtatttctacttgttcttcaacatctgcattcaattgatgttcttcttctaaaatttctaaaattatatcgtaagtcatttcaggtctgcgtaataaatcgatagctaaaataccatcttttaagcgagaaccaccatgttgttcaataatcgcttgcgtatgttcgtttggtttaatacgaatatctgataaacgcttaatttccgcatcaatttgctgacgtttttcattaaaacgtgcatatcgttcttcagaaatcataccaagttcatatcccatatccgtcaatctcaaatcagcattatcatgacgtagtaacaaacgatattctgcacgtgatgttagtaaacgataaggttcattagtacctttagttacaagatcatcgattaagacaccaatatatgcatctgaacgacttaatatcttttcgcctgtgtttaacactttacctgcagcgttaatacctgccatcaatccttgtcctgctgcttcttcataaccagatgtaccattaatttgacctgcagtatataagtttttaatcattttcgtttcaagtgtaggccataactgcgttggcacaatcgcatcatattcaattgcgtagccggcacgcatcatatctgctttttcaagacctggtatcgtctctaacatttgacgttgcacatgttcaggaagacttgtagacaatccttgcacatatacttcatttgtattacgaccttcaggctctaagaaaagttgatgtcgcggcttatcattaaatcgaacaaatttatcttcaattgaagggcaataacgtggcccggttcctttaatcatccctgaatacattgcagatagatgtaaattatcatcgataactttgtgtgtttcagcattagtatacgttagccaacatggcaattgatctaatatatattctgttgtttcaaagctgaatgcacgacctacatcgtcacctggttgtatttcagtcttcgaatagtcaattgtttttgaatttacacgcggtggtgtacctgttttaaaacgaacaatatcaaaaccaagttctcttaaattgtctgataatgtgattgatggtaattggtgatttggtccacttgaatacttcatattacctaaaatgatttcaccacgtaaaaatgttcccgttgtaataattactgctttagataaatactctgtaccaatatttgtacgtacacctttaacttcattatcttctataataagttcgtctaccataccttgcattatatgcaaattttcttcatcttcaatcacgcgtttcatttcttgttgataaagtactttatctgcttgcgctcttagtgctcttacagcaggtcctttacctgtatttaacattctcatttgaatgtgtgttttatcgattgtttttgccatttgtccacctaaagcatcaatttcacgaacaacgatacctttagctggtccacctacagatgggttacatggcataaatgcaatattatctaaatttattgttagcattaatgttttagcaccacgtcttgcagatgctaaacctgcttctacacctgcatgtcccgcacctataacgattacatcatattcttgaaccacaatataaacctccttatttgatatcttactagccttcttaagacggtattccgtctatttcaattactatttacctaagcagaattgactgaataactgatcgatgagttcatcacttgcagtctcaccaataatttctcctaatatttcccaagttctagttaaatcaatttgtaccatatccataggcacaccagattctgctgcatcaatcgcatcttgtatcgtttgtcttgcttgttttaataatgaaatatgtcttgaattagaaacataagtcatatcttgattttgtacttctccaccaaagaacaaatctcgaatttgtatttctaattcatcaataccttcttgttttaacattgaagtttgaattaatggcgtatcacctatcatatctttaacttcattaatatctatgttttgctctaaatccattttattaacaattacgattacatcttcatttttaaccacttcatataatgtgtaatcttcttgagtcaatgcttcgttattgtttaatacaaataaaattaagtctgcttggctaagagcctttctagagcgttcaacaccaatcttctctactatatcttctgtctcgcgtataccagcagtatcaactaatcttaatggcacgccacgaacattgacgtactcttctaagacatctcttgtagtacctgctacctcagttacaatcgctttattatcttgtattaaattatttaacatcgatgatttacctacgtttggtttaccaacaataactgtagataaaccttcacgcataattttaccctgcgcaccggtatctaataaacgattaatttcctgtttgatttctttagactgctctaaaagaaattcagtagtcgcatcttcaacatcatcgtattcaggataatcaatattcacttccacttgagcgagtatctctaatatagattgacgttgttttttgattaagtcacttagacgaccttcaatttgattcatcgcaactttagaagctctatctgttttcgagcgaataaagtccataactgcttcagcttgagataaatcaatacgaccattcaaaaaggcacgttttgtaaattcacctggctcagccattctagcgccatatgtcatagtaagttccagcactctattaatcgttaaaataccaccatgacaattaatttctataatatcttcgcgtgtaaatgtttttggcgctcttaacacagacaccataacttcttcaaccacttctttagactctggatcaataatatgaccgtaattaatcgtatgtgatggaacatcatttaaaagatgttttcctttatataatttgtcagcaatttcaacggcttgcggtccagacaatcgaacaattccaattgccccttcacccattggtgttgaaatactcgtaattgtatctaaatccatattgctactcgcctccttcaacgatgtgaatacattttaaagtaagttattataaccctaaggtcagtcttacgtttgtctgaggtaagacttcgggatgcgttgagtggttaatgttttccttcccctaccctatccttacttaatctttttattaaaaactttggcaattttaagtacgtgctcaagactattctgtatttgtaaagtcgtcatatctttagctggctgtcttgctattacaataatatctttggccaatatatgcgacttatgtactttgaaattttcacgtattgctcttttaatcttgtttcttaacactgcattacctagttttttagaaacactaatacctaagcgaaaatggtctatttctttattattacaagtgtatacaacaaattgtctgttggctacagaatgaccttttttatatattctctgaaaatctgcattctttttaattcggtaagctttttccaataacatcactcgcttatttatcgtttttatttgaagctatatttaaacttctattgagcttataacataaatttctatttattcttaatttaaacgaaaaaaagatcactgatgagtcagtgatcttatgcagataaaactttacggcctttacgacgacggcgcgctaaaactttacggccattttttgtgctcatgcgttttctgaaaccatgaactttactatgtttacgtttatttggttgataagtacgttttaccatgcaaaacacctccatctttatacagttatctaatataccagattatgcagactctgatcactttaatagataagattttgcgtttcttagattaaaattctcgtattagctcattgattatctagtcataattcaagcaactactacaatataacaaaatcctttttataacgcaagttcattttatactactgctcaatttttttacttttat
